United States Patent Application Publication US 2022/0008368 A1 - sequence listing, part 16

SEQ ID NO: 2 - DNA, 58617616 bp, Homo sapiens (residues 32,565,346-34,736,368 of 58,617,616)
  modified_base (1)..(60000): a, c, t, g, unknown or other
  modified_base (24448981)..(24498980): a, c, t, g, unknown or other
  modified_base (24552653)..(24552752): a, c, t, g, unknown or other
  modified_base (24891257)..(24891356): a, c, t, g, unknown or other
  modified_base (24895791)..(24895890): a, c, t, g, unknown or other
  modified_base (24898314)..(24904771): a, c, t, g, unknown or other
  modified_base (24908590)..(24908689): a, c, t, g, unknown or other
  modified_base (27190875)..(27240874): a, c, t, g, unknown or other
  modified_base (58607617)..(58617616): a, c, t, g, unknown or other
aattgcagtctttgtcattacttttttttttttttttttttttttttgagatagagtctcattctgtcgcccaggctggagtgcaacagtgcgatctcggctcactgcaacctctgcctcccaggttcaagtgattctccttcctcagcctcctgagtagctggattacagacacctgtcaccacctctagctaaattttgtatttttagtacagacagggtttcgacatgttggccaggctggtcttgaactcctgacctcaagtgatccacccgtctcggcctcccaaagtgctggaattacaggcgtgagccaccgtgcccggcctttgtcattacttttgatggcaaaaactgcaattaattttgcaccaagcgaatacatgtcttgacatatcttcattaccagttgacctttggattttcactctaaaatgattctatcacaaagaaaatctttaagtttgtaatgaataatttaattgagctgggcatggtggctcacatctgtaatcctagcactttgggaggctgaggtggaaggattgcttgaggccaggagttcaagaccagcctgggcaacatagtgagggctcgtctccacaaaaaaattttaaaattagccagccatggtggcatgcacctgcagtcccagctactcgggaggctgaggtgggagaatcgactgagcccaagaattcaaggttacagtgagctatgatcgcaccactgccctccagtctgggtgacagagtaagactctgtctctaaaataataataataataataatttaattaatcttatattaattgagaatttgggtgatagtagtccattgtagcaaatacactattatttaaggagtaagggttaactttctcatgaatcaaaataattcagtacaaccccaggaagaaacagatctgtgtaaactgcagggaagacgattgagcccaggagggtacttagctcagtgccatcacacaggggaggtatagaccctctgacacagagttttgctgctctttatttccaaaatcagtcctggtcaaactgctccatgctccttgagcccagaaagtcacttgggctcccaaagacagccagggcactttagaatgccgtagcccacaggccagcccatggctatctgcatgcacccagagagcccacctagaaccactcaggaaaatgaacagtaagggcatggagacaaggcttagggttgtctaagaatcagagtgcagctttggaatacatgggaactgtctcatggctctggcgcggtttgcttactcattcccatgggaggattccagatggttagtgtgtgtatccccagcccacatggcctcccaggcgagggtcatttgctcaccacatataccacttttgctgtatccatataccatcctattctacccagaggatttttaccctcactgtgtgctggatccaattcctactggattgcaagaatcaattgttaaaatttcagaaaatgtgcaagctgtattttgttttgttttgttttgttttgttttaatttttgagacaaggtctcactctgtcacccacactggagtgcagtggcgcaacctcagctcactgcaacctccaccttctgggctctagttattctcctacctcagcctcctgagtagctgggactacaggtgcatgccaccatgcctagctaatgttttgtattttggtagagatggggttttgctatgttgctcaggctggtcttgagctcctgagctcaagcaatccacccgcctcagcctcccaaagtgctgggattacaggcatgagccatagcacctggcccataagctggtttttaaacgtagtcattattaaaaaaaaaaaaaagagagagcttataattaagtattgtgttaaaatatgaaggtactaaatacctaaagcatcattcctattttactgtgttctactcccacatttgctctgatgttacttacatctgttctgcccctatggtgggaatacaatataatgacgtgctactgtgcccaactcagctccctgttcagtgacctcacgtcggcaacctgaaattggccatggtggaagaatttacaccacagaaagcagcaaatgtgacaaatcagggtttcttttgttttgttttgtttgttccaagaaactttgttacgcatttcccaacgcactgccagatattggcatatcccttgtgggatatgtggagtgggatgaatagcagttagtctggtgaatagcaggagaccttcccagcagagtggatggtctgcacagacacttggaggtagcaaaaggcatgagccagggccagcctgagactgttaagaggacctgggtactgcccaggtgtcaaagaaaatgaggaccgagggcaggcgccatggtccgtacctataatcccaacactttgggaggtcgaggtgggaggatcgcttgaggccaggagttcgagaccagcctgggcaacaaagcgagacccccatctctacaaaagttaaaataggtcacagtggctcacacctgtaatcccagcactttaagaggctgaggtggaaggatcacttgaggccagaagttcaagacaagcctgggtaacacagcaagaccccatctctaaaaagtaaaaatatctcttgaatgaatgagtgagtgagtaatgttactagatgagaccaaagaatcgccttctcaggatgttttttgtttttttgtttgtttgttttggtttggtttggtttggtttttttgagatggagtctcggtctgtcacccacgctagagtgcagtggcacgatctcagctcactgcaacctctgcctcctgggttcacgccattctcctgcctcagccccccgagtatctgagactacaggcgcccgccaccatgcccggctaattttttgtatttttagtagaaacagggtttcaccatattagccaggatggtctcgatctcctgacctcatgatccgcccgcctcagcctcccaaagtgctgggattacaggcatgagccaccgcgcccggccaggatgtttttaaggacaggtgaaagtcctcctaattttatttgaggagaggaaggtcttcctcatctcctttgaggttggttctctttggatgaggcaggtggaggctacgatgaaatttcatcttggcccccaatcatacaggacccctgtcggcatcaagttccccagaattaagacccagaactgagagttatcccaaggcccatggggtcataaacagccaggaatgaaaaaaaatttattggtgccaaactgtagagaaaaaaaatgcaaagtcaagatgaatacacttgatgaaactcaaattgaagcccttgtgttatcatttattatttatatatatgcattatattggatgtggaatggggtgcatttctgtatatttaacgttttatgtaatgggtgctccaaaactaaaggagcccaggaggctcttaaaatagcccgcttcctgttagccagcaaactttcatgtcttttcctttcttttcttttcttttttttttttttctgagacaggatgtcactctgtctcccaggctggtgtgcagtggcacaatcatagctcactgcagccttgaactcctgggcacaccacaattcctggcttattttttaatttttttgcagagacggggggggtgggtctcattatgttgcctaggctggtctcgaactcttggcttcaagcaatcctgtcatttcagcctcccaagtagctgggactacagatgcaagccactgcccagcttatttattattgtgacagagtctcactctgttgctcaggctggagagcagaggcatgatcatagccactgcagcctcaacctcttgggctcaagggatcctcctgcctcagcctccttgaatagctgggactacaggcacataccaccatgcctaatttttttttatttttttgtgcagacaagggtctctctatgttgcccaggctggtcttgaactcttggcctcaagcaatcctcctgcttcagccccctaagtgctgggattacaggtgcgagccaccatgcacagccagtctgtggctttctagccatgacaaggaagtcctgacgagataatatagccatctcctcaccctcctgtatggccatctcatggtgaagaaagctgttatcccagcaagtggccacaaaagcttggacggagctccttctcaagtaaaagactataactagttttcaatgagaagctttctttttctttttcttttcttttttttttttttttttttgagacagagtcttgctctgtcacccaggctggagtgtacagtggcgcgcgatcttggctcactgcaacctccccccttccagtttcaagtgatcctcctgcctcagcctcccgagtagctgggactacaggcacccaccaccacactctgctatttttgtattttttttagtagagatggggtttcaccatgttggccaggctggtctcgaactcctgatctcaggtgatccgcccccctcggcctcccaaagagctgggattataagcatgagccactgcacccggccagatttattttttaatggaccacactctgcttctgctccttgcatttcagtgagttccacggcaccgtttccatgatatcacgactgatccatgcaggatcacggctaataaatggctctaaaacaacctgtgaagacataaccattaagtgtgccaggtaccaatctgcaattccacatgctgcacatacagctctgaagcgcacgctccccacaagcccgccgtggctttctcagaggatcgggcatatggaaccataatggagcataaatttacagcaacagagatggacgagggagattaaagcttcatctgtaaggacatactgcatggcaaaaaaaaaaaaaagaaaaaagaaagaaagaaaaaagaaaacaacagttattgtagtttctgctttgtagtataatgagaaactcagtcgcttttgatagagtgtgggctccctctgctgcttgcaggagacaccaggactccgggcatttggggttccttggagatcagcgcagaggaggtggcctgaagtgggaagagaaagatggggctgagcgttgcagacggaccgactggttctgcaggctctgaccctgtgggcttctcagagtaattatgctgctgctgcaccaagaagcaagaaatggaaataacagaaaaacgcaaagaaactgtaagatgcactggccagatcacctgtgtgcacagaggaatgcatcacggaagcaatgcagcctgcccagagcagcttctccttccctccctccctcccttcctgtttaaatttttgcagagatggggtctcgttatgttgcccaggctggtctggaactcctggcttaaagcaatcctcccgcctcagcctctcgagtagctgggactacaagtgcaagccactgctcttccttccttccttccttccttctttcccttcctcccttcctttcttctcctttcgtccctccctcccttccttccttttccctccatccctgcctccctccttccctcccttcctacctaccaaccttccttccttcctccttccttgtttcctccctccttccctccctccctcattcatttcccagtcacaaggtaggactgcacttccccacccgctttgatgttaggcatagtcacatgattcactttggccaacacaatataaagaaaaatgatgggtatcatctctggctggaaacttaaagggacaggtcgggtgcggtggctcatggctgtaatcctagcactttgggaggccaaggcgggtggatgacttgaggtcaggagttcgagaccagcctggccaacatggtgaaaccccatctctactaaaaatacaaaaattagctgggtgcagtgacacgtgcctgtaatcccagctactcaggaggctgaggcaggagaatcgcttgaacccaggaggcagaggatgcagtgagctgagattgagaggtgacagcatgctggcagtcctcagagccctcgcttgctctcggagcctcctctgcctgggttcccactttggcggcacttgaggggcccttcggcccgccgctgcactgtgagagcccctttctgggctggccaaggccagagccagctccctcagtttgcagggaggtgtggagggagaggcgcgagcaggaaccggggctgcgcgcagcgcttgcgggccagctggagttctgggtgggcgtgggcttggcgggccccgcactcggagcagccggccagccctgccggccccgggcaatgagggacttagcacccgggccagtggctgcggagggtgtactgggtcccccagcagtgccggcccaccggcgcggtgctcgggacctgcagtcttagctgccttcccacggggcagggctcgggacctgcagcctgccatgtctgagcctcccaccccctccatgggctcctgtgagcccgagtctcccggacgagcaccacccactgctccagggcgcccagtcccatcgaccacccaagggctgaggaatgtgagcgcacagcgcaggactggcaggcagctccacctgcagccccggtgagggatccactgggtgaagccagctgggctcctgagtctggtggggacgtggagagtctttatatctagctcagggattgtaaatacaccaatcagcaccctgtgtttagctcaaggtttgtgagtgcaccaatcgacactctgtatctggctgctctggtgaggacgtggagaacttttatgtctagctcagggattgtaaatacaccaatcggcactctgtatctagctcaaggtttgtaaacacaccaatcagcaccctgtgtttagctcaaggattgtaaatacaccaatcggcactctgtatctagctcaaggtttgtaaacacaccaatcagcaccctgtgtttagctcaaggattgtaaatacaccaatcggcactctgtatctagctcaaggtttgtaaacacaccaatcagcaccctgtgtttagctcaaggtttgtgaatgcaccaatcgacactctgtatctagctgctctggtggggccttggagaacctgtgtgttgaaactctgtatctaactaatctgatggggacgtggagaacctttgtatctagctcagggattgtaaacgcaccaatcagcgccctgacaaaacaggccagtcagctctaccaatcagcaggatgtgggtggggccagataagagaataaaagcaggctgcccgagccagcattggcaacccgctggagtccccttccacagtgtggaagctttgttcttttgctctttgcaataaattttgctactgctcactctttgggttcacgctgcttttatgagctgtaacactcaccgcgaagatctgcagcttcactcctgagcctggcgagaccacgagcccacggggaggaatgaacaactccagactcactgccttaagagctgtaacacataccgcaaaggtctgcagcttcactcctgagccagcgagaccacaaacccaccagaaggaagaaactccgaacacatctgaacatcagaagagacagactccagacgcgccaccttaagagctgtaacactcaccgcgagggtccgcggcttcattcttgaagtcagtgagaccaagaacccaccaattccggacacaagatcacaccactgcactccagcctgggtgacagacaagattccgtctccaattaaaaaaaaaaaaatttaaagggacagtgtgcagttcactaggttatctcttccctggtacttggtagcattgagatgacagctgctctgtcagcctaggtctcagagtgagaaaatgaggtaggaggcagaacagactccagagtcggggcttggacaccagaccagattgaagactagctaaaacagggatgtgctggaagctcctttccataagacacgtccaccagtgcgtcatgtcagtttaccacttccatggcaacacccaaaaattactgcccctttccatggcaatgacccaacaacctggaagttaccaccccttttctagaaatttctgcataatctgccccttgatttacatataattaaaagtgagtctaaatgtggctgcagcactgcttctgagctgctcctccaggcacactgcctgtggggtggtcctgctccgcaaggaacggcccctctgctgctgctgctgtgcatgagtgcttcaagagaagttgctatccgacaccaccagcttgtcctggaattctctcctgggcaaagccaagaaaccctcccaggcttagccccaattctggggcctgtcctgctaaggaagaagggagggtgaaagaaagaaagaaatgtgtaattagtttgttagggatgccatataaaactaccacaaactgagtggcttagaacaaaagaaaattgctggccatgcagaaagaagtactgcagtagctgatgataataattttcctttctgaaaatatcaggctgggcatgctggcttgtgcctgtaatcccagcagggatttgggagggattcgggaggccaaagtgggaggaaggtttgaggccaggagtttgagagcagcctgggcaacacggcaagaccccatctctgcaaaatgtttagagagctggacatgatggtgcgcacctgtagtcccaactcctagggaggccaaggcaggaggatcacttgagcccaggagtttagagttcagccttggcaacagagtgagaccccatcttttttaaaaaaaaaatattgtctcacagttctggaggctggaagtgtggtatcaaggtgtcagcggggccatactccctctgaaacctgtaggaagaggctccttccccatctcttcctagctacttgtggtttgctggtaatctctggcactccttggcttatagatacatcattccaatcatgttcatcttcccctgtgcatgtctgtctctgcatccaaattttcccaatttccctccctcccctcatcccccacctttctttcttttttttttttttttttttggtctgagacacagtctcactctgttgcccaggctagagtgcagtggcacaatcttggctcactgcaacctctgcctcctgagttcaagtgaatctcctgcctcagtctcccgagtagttgggattacaggtgtgcgccactatgcctggctaatttttgtatttttagtagaaacagggtttcaccatgttggccaggctggtctcgaactcctgacctcaggtgatccgccctccttggcctcccaaagtgctgcgattacaggcgtgagcaaccgtgcttggaccaaatatcccctttatataaggacaccagtcatactggattagggctcacccccaatgacctcattctaacttgattacttttgtaaagaccctatttccaaggtcacattctaagatactgggggtaaggacttcaacgtgtctttttgcagggacataattccacttataacagcaggttcacagagctcagcctttcagctggcttcttaccagtcaataaacccacccatacacttggagttcctaatcaaatctttcttgctttctccttaaaaatgaacaggttaggccgggcgtggaggctcacacctgtaatccccaggactttgggaggccaagacgggtggatcacctgaggccaggagttcaagaccagcctggccaatccagtgaagcccatctctactaaagatacaaaaattagccgactgtggtggtgcccacctgttgtcccagctactggggaggctgaggcaggagaatcacttgaaccgggaaggcagaggttgcagtgagccaagattgcaccactgcactccagcttgggcaacagagcgagactccattccccaccccccgcccaaaaaaatgaacaggctaatcaaggaccaccaactatctaatgacagcctatggcatgtgggagagactataataaccatgttttcttattttaaaattttagatacaggggtccacgtgcaggtttgttacacaggtgtattgcatgatgctgaggtttgggcttctattgatcctgttacctatataatgaacatagtacccaacagagagttcttcaactattcccctcctccctccgtctcactgtcagagtccgcagtgtctgttgtttccatctttatgtccacgtgcacccgagatttagctcccacttataagtgagaacatgcaatttttggttttctgttctgtgttaatttgcctaggataaaggcctccagctgcatccatgttgctgcaaagaacataatttctttcttttttatgactgcatagtattccatggtatctatgcaccatgcattttctagtttctgtttttgatgctctgacatcttggggccttgctgaccctggagggatggtccctcccagggctagccacatcctaaagatagtaagtgactctcctgtgagcacagctttcagatgcacaccagccaatccagaagtcattccccaaccacctccgtttcagggccctcacagggctgttacactcagggcaactatttctctgccctagtcaccccagggcccagtaccagactattagaagcagagcccacaaaaattactcaaactagccaatcctgagcctgcgtatctgcctcacctgttccttctcacagaactcacaaaaaaggctctcgtccacttttaccctcttccctctgcctcgtgactgcccctggcccctgtgtggtgtgccctgcctcctgtttctggcggtctgtgaatctaagctttttccttcatgaccgtcaattccgtgcctgtatgtcttcgcatatctaatttaaacaaatcctgggtacccttacaacagaggccaagaaaaataatcaggtataaaaacaacctgaaaagaaagaggactaactcaggaaatgaaagaggatgtttaattggtttccaattattattataacaatatttaagaagttattacactcaaaaatcaagaacaagatagtacgcaaacagcatgataatgctgcataaacagagtaaggagaataagtaaataaataaatttttaaacggtgcaataagggaacaagaaagtgttcttataaaataaaaatataatggcttaaataaattcaagagaaaggtcagatgataaaacagaagaagccttccataaagtaggacaaaaagaccgagatggaagacatgaaagaaaagggatatgaaagatttatccaggaggcccagtttacagttgtcccagatagagaaagatagaaatcaaagaggaaaaaagtatcaaatggacaacaaaacaaaattgcccaaaagttaaaggtagaagtttccagatcaaaagaatctaccaagcaaacaggacaagggcttttaaaaggcccaaacctttgcaaaatttcagaatcctgggaggaaaaggaaagattctaaaacttttctttctcttctttttctttctctttctttccttccctccttccttcttcctttcccattccccttccccttccccttttcttcccctccctccctctgtctctctctctctctctcactctctctctctctctctctctctttctctctttcggggctcactctcacccaggaaaattcctaggctcaagcaattcccacctcagcttcccaagtggctgggactacaggtatgcaccaccatgccctaatttttaagttgttgtagagagagggttctcactaggctcatcatgttgcccaggctggtctctaactcccagcctcaagcgatcctcccacctcagcctcccaaagtcctgggattacagctgtgagtcatcacacttgaccaaaagctttcagaaagagaaaaaaaaaaaacaccactcacgaaggaataggaatcagatttttgtatcacgaacaccaaatgctagaagacagatgagatgtacctttatactccaaagggagtggacactaaacacaactggatcacgaactgacaagaaaacaaacagtggtggtgaaggttatttgaataactggagagacaaatgtgggctacatcaagtagatgatactattttatctatattaatgtattgggtacaataattatattatatatgagtatatctttgttcttaggatatacacttaggagtgaactgacatatttgaaaccttcaaatggttcaaaaaaactgtgtgtgtgtgtgtgcatatgcacacacgtatgtatgtgtgtgtagacatataaagtcaatgtggcaaacttaatgattaatgaatgtatgggaaagatatatacacgttctttgtactattcctccaatttttatagatttgatggttttcacaatgtaaagtaaggaattttacaaattactaatatataacaaagttagaagggtaaattaaaaataacattttgtattatattttaatttaaagtaattctgaggggaaaatattttatccaaaagtctataaccaaccatgaattagtcaagtgttatggtcaattaaatatttagacatatgacaatatagaaaatttgtctatcacagactttttaaagacaattacttaaaaatgtgtttcaacaaacttaagggttaaaccaagaaagagcataaggaatccaagaaatagaggatgaaactcaagatggcaaggaaggaaaatctaggataagaggtatgcaacagtccccaccattcagtggggaaaggacagtcttttcaacaaatggtgctgggaaaactggatagccacatgcaaaaacatgaagtgggacccttacctaatgccatattaactcaaaatggaccacagacctgaacataatgagctaaaactatagaacttctagaaggaaacaggagaatagcttcataacgttagatttggcagttatttcttgggtatgacaccaaaagcaaaggcaacaaaagaaaaaataggtaagttggactttatgaaaattaaaatattttgtgcattgaaggacacaatcaacagaatgtaaatcccatggaatgggagaaaatagttgcaaatcatatactttgataagggattatctaaaatatgtaaagaactactacaacgcaacaacaaaaaaagaaaagcaaattttaaaatgggcaaagggctagaagagacatttttcttttcttttcttttcttttcttttttttcttgagacagagtctcgctctgtcaccaggctggagtccagtggcgcgatcttggctcactgcaacttccggctcccgggttcaagtgattctcctgcctcagcctcctgagtagctgggactacaggtgcgtgccaccacgcccagctaatttttgtatttttagtagagacagggtttcgccatgttggccaggatagtctcaatctcttgacctagtgatctgccctcctcagcctcccaaagtgctgggattacaggagtaagccatcgcacctggcctagagtagacatttctctaaagaagatatacaaatggccaacaagcacatgaaaagatgctcaacatcactaatcgttagagaaatgcatatcaaaaccacaacacctcacctcatacccgttaggatggttactatcaaaaacaatcaaaaaacaaacaaacaaaaaaacagaacacaacaaatattggtgaggagacggtgaaattggaaccttcattcactgttggttggaatgtaaaatagtgcagttgctgtggaaaatggtatggccattcctcaacacagaattatcacattatccaacaatttctcttctgggtatatatccaaaagtgaaagcacagacctgaacagatatttctacacccatgttcatagctgcattattaataatagccaaaaggtggatgcaacctaagtgtccattgtcagatgaatggataaacaaaatgtgctaggtatatccatacaatggaatatattcagtctaaagagggaaagaaattctgccacatgctacaacatgaatgaacctttaagacatatgctaggtggagtaagccagtcacaaaaggacaaatattgtatgattccacatatacaagatacccagaataggcaaattcatagaaactagaatgagaatgggtggagactgattattattctcagacccctcccacccccacccattcccattagaggcccctcacaccaacctaaatctttactgggtagagttccagttcaggatgataaaaaaaaaaagttgtagagattgatggtggacaaggtggttcatgcctgtaatcccagcactttgggagaccaaggcaggtggatcactttaggtcagaagttcgagaccagcttgaccaacatggtgaaaccccatctctactaaaaaatacaaaattagccgggcacagtggtgcacgcctgtggtcccagctacttgggagactgatgcaggagaatcgcttgaacccgggaggtggaggttgcagtgagctgagattgagtgacaactgcacgataatgcatttcataccactgaaaagtacacctaaaaatggtgaaaatggtaaattttgtattgtgtatattttgccacaattaaaacacacaggccaggtgtggtggctcatgcctgtaatgttagcagtttgggaggctgaggcaaaaggattgcttgagctcaggagatagaggccagcctaggcaacatagcgagaccccatctgtatttttttaatgtaaaaaataaaataacacacacacagacaaacaaacagaatctgtatgagtcacacgtttaggtagctgaatatcctctctgcccccaattcccccaagtcaaaggcagaagggatttgttccaccaaagagtttacaccagccacagctgcccactgcagtatcctcccaggaaaagcccttttgtgcgtggaggaggcagatggcgaggaggcagatgtgcactttttttttttttttttttttttttagagacagggtctggctgtgtctcccaggctggagtgcagtggcgagatcaaggctcactgcagcctcgaacttccgggctccagcgatcctcctgacacagcctcctgagtagctgggactacaggtgcacatcaccgcgcccaactagttttttaaaattttagtagagataggctcttgccatattgcccaggctggtctctaactcctgacctcaaatgaccctaccgcctcccgaagcgtcgggaccacaggcggcgagccaccggccggcctctgtgtgcaccgaggagccgggcagccaccgccacgatccagctttaggacatttccatcaccccactcagccttcctgcgcccctggttcctcatctataaatagagataatatacgcctaaccctctaggtcaccagcacattgcacccataattattatacttgttgatgccacactttcaggttttaacctttccaaagcgcagccccgccccagcgcagcccaagtccctgcacgcagaggcgccgatcacgggtgggaggtggatcccggaggccccgccccaggccccgcccctccgtgcgcccaagctcgaccgcctgaaatcggggaatcgggcctctgccggcgccctggcagcggcgcggggcgtggctccgggctggattggtggcgcctgggccccgcgagcgcctgcgcagtggtcaaggccgcgctcgcgccgaggggctgcgagagtgaccgcggctgctccagcgctgacgccgagccatggcggacgaggagcttgaggcgctgaggagacagaggctggccgagctgcaggccaaacacggggtgagcgcatcagcccccgccaggcttggccctcgcggggcgccgccctcgcccggagtgtagggcgcgcctccggggcggaggctctgggcgcctccccggggccccggtcccctgcgctgccctggcggcctcgtggccggctcagaggtggcctcgtcgctttcctcgtcgcgaggggcccaggaggctggcggcgggggccgccacgtgcgggacctgccctggcgttggggtgtggggtcccctagcctggagcgggctcgtcctggcgggcctggatccaagcacaatctcagcttttggagccagcagccggaccgaattcagtttttccggagttcagttgttatgacccaagtttagccgacaggtattgagggtccgctgtgttcccggtgctgagagcgcggcagggtcggaggaacgcttgccccgccgggatgacagggaggggccgcctgggaagcttggatggatcacacgcccggagaggcgtttctgataagggaccgggaccttagggacggagggcgcagtctttgagttatcgttgtccctaataccgaggcccgttttattttccagaaattattcctacatgtgaaacacggtttcgtaatacagggattcccctccccagggtgctctgtattccaaagccttctgaggttgtggttttagacgttcatcaaaacgttgtaagtgggaactagttcattgatttctgtgaggcccagtttcttatttggggagttgtttctaccaccgcaagagactgttatgtataggaaacaacagaaccgttcctttttcccgccgcctcccgtgaaatttctctattaaatttaagttttttttttccaggatcctggtgatgcggcccaacaggaagcaaagcacaggtatgggctggaaacgtgaactttttgaagggtggtttcaccaaatggatttcttttgctgtagttattttaagcaggtgtgtgactcagatttttttgttttgctggaatggtgatttggccaaaatcatccgcagggtatcttcattattgttaaataaacacgtgtgcagctccacatcagaccttgtattgcaattactggttgatgtttctctgctacaatgtgagtaccttaaaaatgagcctgataataggcagctgtggcagtttcctcggctgtgggggtgacgtgagtccggtgcctcacttagtaagtgctcaataagtgttaactggtaagctattctgattgttttatcccaacacagcgcacagcacctgagacagatgcaggtaattgattcggtggcaggtttattgaatgagtatgtgattaccctatcatgctatcattttttaaaaattgtggttaaataaaatttcaccatcacaaccatttttaagtgtgctcttcagtagtgttcacactctagaatgttttcatcttgcaagactgaaacctttagctactggacaattctctatttccccttcctcaccttcttactcctcctctccagcaaatatttatagagcacctgctctgggtcaggcactgtgctgggtctacagaaataggaagggagggttcgggagaagacagacggtgagaagtatctggagtagtgataggaagtaaaacgacgcaaatttcattgatttctgccgtgtacatcttttcattgtcacatatctgaaatcaggatgccttttaaaacagattgctcttgccccagattcttccagaggggatttacttttgactctgctatcacttgagtacatttctgagaccattgaaagttaaattctctgcttgaggttttcccctgcctcctgcctagtagtgtgaattcagacagcaaccctgtaagactgaacttttttcttctttacgtcagggccaggtgcatgcaagcttttgtactgccccttactgcatggcatatttatttattctttactttgtactgagaatgttgctctttgataccccagtggtgggatcagaactcactgcagcctcaaactcctgctgggctcaagtgatcctcccacctcagcctcctgaggagctgagatgacaggcgtgcaccaccatgcctggctaatttttttaaactttttttttttttaatagcctcgctatatcacccaggctggtctcaaactcctggcttcaagtgatcctcccaccttggcctcccgagaaaccccagttttgaatggagatctctattagacctctcattttagggtttttcatttttagagatacgtaaaactatggtgtatcttagaattgatggcatcttagggttctgtgatataatagtttgtggcaggccaggtgtggtgactgaagcctgtagacccagctactcaggaggccgagggggaagaatcacttgagcacaggagcttgagctgatcatagctgcagtgagctgtgattgcaccactgtactccagcatgaacagcagagtgagaccccatctttttttattgttgttgagatgaagtctcactccatcacccaggctggagtgcagtggcacaatcttggctcaccgtaacctctgcctctgagcttcaagcgattctcctgcctctgcctcccaagtagctgggattacaggcacccgccaccatgcccggctaatttttgtatttttagtagagatggggtttcaccatgttggccaggctggtctcaaactcctgacctcaagtgatccacccacctcagcctcccaaagtgctgagattacaggcatgagccaccatgcctggcctagaccccatctcttaaagtttgtggcagggctgcagtactcaaaccataaagaagtggcctatggaaatgagctttaagccacattccatgaaccgaagggcctctgagctgggagtggatagtgggcacagccagccccagctctccctctcagttgagccaaagcatctgtgctcatttgtttttagatttcttaaaggatttcatttgaaagaaaaaagaaacaagtccatgagaccactgtcctgtgaacgtgaactactttctatttgggtaggtaggaagaagtgaggatagttgcaaagttataatttcattccccttccccacccagaaaaatagaactgagagtcttaaaacatggaatctggctgtagcttggccacagttacctatgtctctttagcatagcctcctggatctcagctttatctctaagaaaatgatatagattagtcacatggtccttctaattgcctgaaatcccactataaatttctagcacctgtcacgcaataggtacttaagaaatgttggtgatggtgtttgaactgaggctccactctgatgaaactgtaaagctcaccttccagcctggtaggttgtcacctgtgtaatataaagctggttctttgagggcaaaaggggattctacttgaatgtagctgcagccttatgtacagcaactaccataatgcagtttgtataccgcaggccccatgtggagacacatactggatgggttctttctcgtatgttacatgggaatgccgacagctgtgttttaattgtgtttgacctatgttttcgttgtagggaagcagaaatgagaaacagtatcttagcccaagttctggatcagtcggcccgggccaggtgtaagcatctttgatttcatttccataaagttagcttgagttagttgaatggggtgattagataccattattgctatcactagatgaaatatttgcttaggctgaaaacacttgagatgtgtaagaagtgtgaagtttataaacctagagaactgtactttaatccctagtaaaagtaccaggtcacttctcttaccaagatgttctccaggtgtgtattaggtaagatttataggaaacaactcatagggccaatcacaaaatgttgctggtagttgacattttgtgtcaactggtgatggggactggggatgggggacttaggggctttttatatgtattgtcagttttagtgtatgttcagagttgttcatcataaaaaccaaaacctgtagaaagaaaaaatgagacagtcagaatgaactggtattttctgtattttaactggaagcccagtttgagtgtagaaaaggcggccacaggtggatcaccaccattatgtgtaatagataaaccgctttccagagggcagtcatatattttaagaaacaggaagcatggtgcttagaatctgagaacccaactttaatcttggctgggccactacccccatgtgcccatgtggagattggcatgggtgaacttcagttttctcatttttaagaggagtaacaatactgtcttgccctacactgagggacaagcttgtgaagtgctttggaaaggtcaatgcatagttttaaggtataacataagtgcatttgattttaatggattttttgcatatgtattttttctttttagtaagtaacttagcacttgtaaagcctgaaaaaactaaagcagtagagaattaccttatacagatggcaagatatggacaactaagtgagaaggtaagcttagacagccttgaggaactttactgttacctgctttatcaaaacatggcttcaaaaggtcagctgcatcttcactggattacagaattcttgctgactctcagaagaaattgttggagagaatagtcatacctactttaaaagagaataaattgcctttcctaaattcctctgcttcgctcctttcctggcgttgctctggaaccttgttggtgtctgtgacccaatgactgttagggtcagctagcttcaattgcccctgcactggaagcaaggtttgtcagtaacaccaattaaaatactaccagtgtaagtagaaggtgtgttttgcagatgagaaggtgctaagatgccttgcttatgttctctgtgttgctgtaataccatgaggggtatgttgtggcaaacctggcctttgagatcaagacgaaccccacctgccctgagaagccgtctgctaccaccacagcctacccgaattggtcctgtcccctaaacccctcacactgagaactgcttgtgtgggagagagctggttgggttgatcttttccgagtgtgacttacctccttcaaggggatgtttaagcttctcgggcagaagtggtgtgtctattcctgacaccaaacaccgtggtatatgtggttgtcacactcagctagtgatgataaaggtgttcttaaatatgttagctttcagttttcctgaggaagcaattttatggatacttccccctccttctcaagtgaggaatagcagagcaaattttatttggaacttaaaccaatagttataaccaatagtttcaacctcctgcctcaccactgcttccttcctgagctctttccccacacctcaaaaagagtacaaagtgattccatctgcagaggtaaattctttgtttaaaaaagtactgtttttcttatcttttctggttctcctaggtatcagaacaaggtttaatagaaatccttaaaaaagtaagccaacaaacagaaaagacaacaacagtgaaagtaagtgtccccagatgcttgtggcaaatgaaaagatggatactttaaagattaatgttgagtatacatctaccacacatatttttcagcccagagacattttccttttgtcaaacacgtgaaagtttggggagaaaggctgaatctgttgggggagggttctaatttttataggctcttgactccattcccacccttttagttcacgctaagttgctttaaagacacaaatgtcttgctaaaattggtagaaatcttttctcggaaaatctgagttatgctttattagaaatgttctgacactcatttaattttcctcccagttcaacagaagaaaagtaatggactctgatgaagatgacgattattgaactacaagtgctcacagactagaacttaacggaacaagtctaggacagaagttaagatctgattatttactttgtttattgtctatatgccttttaaaaaaataaacttgttatgcaaaataaaacatttgggtaagttgttttagtatcatagccaagtggccagatctgtgttttgaatttttccccttcctaccaaaagctttttttatttttatttttgttattatactttaagttttagggtacatgtgcacaatgtgcaggttagttacatatgtatacatgtgccatgctggtgcgctgcacccactaacttgtcatctagcattaggtatatctcccaatgctatccctcccccctccccccaccccacaagagtccccagagtgtgatgttccccttcctgtgtccatgtgttctcattgttcagttcccacctatgagtgagaatatgcggtgtttggttttttgttcttgcgatagtttactgagaatgatgatttccaatttcatccatgtccctacaaaggacatgaactcatcattttttatggctgcatagtattccatggtgtatatgtgccacattttcttaatccagtctatcattgtgggacatttgggttggttccaagtcttcgctattgtgaatagtgccgcaataaacatacatgtgcatgtgtctatatagcagcatgatttatagtcctttgggtatatacccagtaatgggatggctgggtcaaatggtatttctagttctagatccctgaggaattgccacactgacttccacaatggtcgaactagtttacagtcccaccaacagtgtaatagtgttcctatttctccacatcctctccagcacctgttgtttcctgactttttaatgattgctattctaaccggtgtgagatgatatctcattgtggttttgatttgcatttctctgatggccagtgatggtcagcattttttcatgtgttttttggctgcataaatgtcttcttttgagaagtgtctgttcatgtccttcgcccactttttgatggggttgtttgtttttttcttgtaaatttgttggagttcactgtagattgtggatattagccctttgtcagatgagtaggttgtgaaaattttctcccattttgtgggttgcccgttcactctgatggtagtttcttttgctgtgcagaagctctttagtttaattagatcccatttgtcaattttggcttttgttgccattgcttttggtgttttagacatgaagtccttgcccatgcctatgtcctgaatggtaatgcctaggttttcttctaggatttttatggttttaggtctaacgtttaagtctttaatccatcttgaattgatttttgtataaggtgtaaggaagggatccagtttcagctttttacatatggctagccagttttcccagcaccatttattaaatagggaatcctttccccattgcttgtttttctcaggtttgtcaaagatcaaatagttgtagatatgcgtcattatttctgagggctctgttctgttccattgatctatatctctgttttggtaccagtaccatgctgttttggttactgtagccttgtagtatagtttgaagtcaggtagcgtgatgcctccagctttgttcttttggcttaggattgacttggcgatgcaggctcttttttggttccatatgaattttgaagtagttttttccaattctgtgaagaaagtcattggtagcttgatggggatggcattgaatctataaattaccttgggcagtatggccattttcacaatattgattcttcctacccatgagcatggaatgttcttccatttctttgtatcctcttttatttcattgagcagtggtttgtagttctccttgaagaggtccttcacgtcccttgtaaggtggattcctaggtatttgattctctttgaagcaattgtgaatgggagttcactcatgatttggctgtttgtctgttattggtgtataagaatgcctgtgatttttgcacattgattttgtatcctgagactttgctgaagttgtttatcagcttaaggagattttgggctgagacagtggggttttctagatatacaatcatgtcatctgcaaacagggacaatttgacttcctcttttcctaaatgaatatcttttatttccttctcctgcctaattgccctggccagaacttccaacactatgttgaataggagtggtgagagagggcacccctgtcttgtgccagttttcaaagggaatgcttccagtttttgcccattcagtatgatattggctgtgggtgtgtcatagatagctcttattattttgagatacatcccatcagtacctaatttattgagagtttttagcatgaagggttgttgaattttgtcaaaggccttttctgcatctattgagataatcatgtggtttttgtctttggttctgtttatatgctggattacatttattgatttgcgaatgttgaaccagccttgcatcccagggatgaagcccacttgatcatggtggataagctttttgatgtgctgctggattcggtttgccagtattttattgaggatttttgcatcaatgttcatcaaggatattggtctaaaattctccttttttggttgtgtctctgccaggctttggtatcaggatgatgctggcctcataaaatgagttagggaggattccctctttttctattgattggaatagtttcagaaggaatggtaccagttcctccttgtacctctggtagaattcggctgtgaatccatctggtcctggactctttggttggtaagctgttgattattgccacaatttcagctcctgttattggtctattcagagattcaacttcttcctggtttagtcttgggagagtgtatgtgtcgaggaatttatccatttcttctagattttctagtttatttgcgtagaggtgtttgtagtattctctgatggtagtttgtatttctgtgggatcggtggtgatatcccctttatcattttttattgtgtctatttgattcttatctctttttttctttattagtcttgctagcagtctatcaattttgttgaccctttcaaaaaaccagctcctggattcattaattttttgaagggttttttgtgtctctctttccttcagttctgctctgattttagttatttcttgccttctgctagcttttgaatgtgtttgctcttgcttttctagttcttttaattgtgatgttagggtgtcaattttggatctttcctgctttctcttgtgggcatttagtgctataaatttccctctacacactgctttgaatgtgtcccagagattctggtatgttgtgtctttgttctcattggtttcaaagaacatctttatttctgccttcatttagttatgtacccagtagtcattcaggagcaggttgttcagtttccatgtagttgagctgttttgaatgagtttcttaatcctgagttctagtttgattgcactgtggtctgagagatagtttcttataatttctgttcttttacatttgctgaggagagcttccaactatgtggtcaattttggaatcggtgtggtgctgaaaaaaatgtatattctgttgatttggggtggagagttctgtagatgtctattaggtccacttggtgcagagctgagttcaattcctgggtatccttgttaactttccgtctcattgatctgtctaatgttgacagtggggtgttaaagtctcccattattaatgtgttgggagtctaagtctctttgtaggtcactcaggacttgctttatgaatctgggtgctcctgtattgggtgcatatatatttaggatagttagctcttcttgttgaattgatccctttaccattatgtaatggcctctttgtctcttttgatctttgttggtttaaagtctgttttatcagagactaggattgcaacccctgccttttttgttttccatttgcttggtagatcttcctccatccttttattttgagcctatgtgtgtctctgcatgtgagatgggtttcctgaatacagcacactgatgggtcttgactctttatccaatttgccagtctgtgtcttttaattggagcatttagtccatttacatttaaagttaatattgttatgtgtgaatttgatcctgtcattatgatgttagctggttattttgctcattagttgatgcagtttcttcctagtcttgatggtctttacattttggcatgattttgcagtggctggtaccggttgttcctttccatgtttagtgcttccttcaggagctcttttagggcaggcctggtggtgacaaaatctctcagcatttgcttgtctgtaaagtgttttatttctccttcacttatgaagcttaatttggctggatatgaaattctgggttgaaaattcttttctttaagaatgttgaatattggcccccactctcttctggcttgtagagtttctgccgagagatccgctgttagtctcatgggcttccctttgtgggtaacctgacctttctctctggctgcccttaacattttttccttcatttcaactttggtgaatctgacaattttgtgtcttggagttgctcttctcgaggagtatctttgtggcgttctctgtatttcctgaatctgaatgttggcctgccttgctagattggggaagttctcctggataatatcctgcagtgttttccaacttggttccattctccccatcactttcaggtacaccaatcagacgtagatttggtcttttcacatagtcccatatttcttggaggctttattcattttattttttctctaaacttcccttcttgcttcatttcattcatttcatcttctatcgctgataccctttcttccagttgatcgcatcggctcctgaggcttctgcattcttcacgtagttcttgagccttggctttcggctccatcagctcctttaagcacttctctgtattggttattctagttatacattcgtctgaatttttttcaaagtttttaacttctttgcctttggtttgaatttcctcctgtagctcgtagtttgatcgtctgaagtcttcttctctcagctcatcaaagtcattctccgtccagctttgttccattgctggtgaggaactgcgttcctttggaggaggagaggcgctctgctttttagagtttccagttttctgctctgttttttccccatctttgtggttttatctacttttggtctttgatgatggtgatgtacagatgggtttttggtgtggatgtcctttctgtttgttagttttccttctaacaggaccctcagctgcaggtctgttggagtttgctagaggtccactccagaccctgtttgcctgggtatcagcagtggtgtttgcagaacagcggtttttcatgaaccgcgaatgctgttgtctgatcattcctcaggaagttttgtctcagagtacctggccgtgtgaagtgtcagtctgcccctactggggggtgcctcccagttaggcgggtcaggagtcagggatccacttgaggaggcagtctgcccattctcagatctccagctgcgtgctgggagaaccactgctctcttcaaagctgtcagacagggacatttaagtctgcagaggttaccgctgtctttttgtttgtctgtgccctgcccccagaggtggagcctactgaggcaggcaggcctccttgagctgtggtgggctccacccagttcgagcttccaggctgctttgtttacctaagcaagcctgggcaatggcgggcgcccctcccccagcctcgctgccgccttgcagtcagcgagactctgtgggcgtaggaccctccgagccaggtgcgggatataatctggtgcgccgttttttaagcccgttggaaaaggcgcagtatttgggtgggagtgacccgattttccaggtgccgtctgtcacccctttctttgactaggaaagggaactccctgaccccttgtgcttcccgagtgaggcaatgcctcgccctgcttcggctagcgcacggtgggctgcacccactgacctgcaccgtctggcactccctagtgagatgaacccggtacctcagatggaaatgctgaaatcacccatcttctgcgttgctcacgctgggagctgtagaccagagctgttcctattcggccatcttggctcctccctgaccaaaagcttttaagcacgtgtaccagcatgactctaccctttgcaactgtgccatgaatattagataggaaaagtgtccgtggcggaaacagaagctgctccagcactcttcaggaagaaaaatatagcagcagcagcagcagccgccaataacataaggggaattaaaacctgtccatcagactgaatcaggttcaacatttgagcacatctaatattctaagatgtagattctgaaagcaggtaagctctttctcttcctgcagatactacttccacttaatgtaagaaaattcctagctttgccaggcacagtggctaacacctgtgatcccagcactttgggaggctgaggctggcaggtcatttgaggtcgggagtttgagaccagcctggccaacatggtgaaaccctgtctctactaaaaatataaaaattagctgggcgtggtggcacacacctgtaatcccagctacttgggaggctcgaacctggtaggcagaggttgcagtgagctgagatcaggccattgcactccaacctgggtgattccatctcaaagaaaaaaaaaagctagctttgatctcatttataattgtttttcagaggtactgatattaacaaataccactccctccaaaataactagagtgataatgactgaaaaagaaaatgaccaaaatagacatgttggtaatgctactacagtaataaacatgtttgtaagagaaatgacttctaatgatttcaaatccagttgagacacttcagcatttaaacattttggtaacatatcactgataatgttgcaggtgacttaaatgttctctcttttgttgtgctttctttccactaggttatgaaaacctgcactcataagttacggttttcagagacggagacttgctgtgttgctgaggctggcctcaaactcctgagtttaactgatcttcccacctcagcctccctcgtagctgagactgtaggtgcaagccactgctcatatatttaaatcataaacttaaccatcaaccagctgtttggtgtaaccttttaaatgtcgtagtcctgtgagacctagcacaggattaaattcataaatttaacaaggtgaataggattagtaaaaaaatgaagggaaatgtggtttgcaaaccccagtctctgcgttagccagcatactactgatacatgtttaaactggagattctactatatttgaaatttgcaactattgtcagtgaagaaatagaacaatatctaacattataaataagtagaaccgttgagaacatcaacatatttttaaaagaatgatcataagatgaaatctggctggggattttctgtcagggtaaactggtaatttaaaaaaaatttggtcggggattttgaaaaaaatcccatttacaggtaaattttgctttaggcctcatttacatacaaatgctaggaggacatgaggcagttcacaagttctgtgctttctcacaggataaccactgtcctaatggcaactgctgtgagtgtgtttaaagatggtcagactctttcagacacctacctgagagtgaaaagtggttccatgtacaaggagagaggttcctgatggcaataagaggctggagtacattttagggagtggagagtggttattctaaactttctaatttaaatcagtgaacttgcgttactttgaattcaaaacttttttccacaaaaatggaaattaggggcattaatttctcaactgtcacatcaagttttgggtagggaaagcaattggaaaaaacaactggttgtttgcttttttttgagatggagtattgctctgttgccaggctggagtgcagtggcatgatcttggctcactgcaacctctctcccaggttcaagcaattctcctgcctcagcatcccaagtagctgggattacaagcgcacgccaccacacccagctaatttttgtacttttagtatagacagggtttcaccatgttggccaggatgacaactgttttttaaaaataatcgagggagtcacttaagatggaaaacattactgatgaccagaatagctcaaaaagaaacagcatttacctctccagaggaagggtacaccaagcttgcagctgccactgccaaccaggccttgatcctggctgtgagatccctcgcagtccccttatttttctgaacctgtttcctcatttgacaattctaccattcacagtgattgttgaaattaaatgggtatatgtgaaaatgttttcagctgggcgcagtcgctcatgcctgcaatcccagcacttcgggaggccaatgtgggcagatcacttgaggtcaggagttcaagaccagcctggccaacatggtgaaaccccatctctaccaaagatataaaaattagccaggcatggatggtggcaggtacctgtaatcccagctatgcgggaggctgaggcaggagaattgcttgaatctgggaggcagaggctgcagtgagccgagatggtgccactgcactccagcctgggtgacagagcgagactccatcatctcaagaaaatgttttcaaaattatattgcactaccccaacatattaggtggtgtcaaatgtgtgtatttgtatcttgagaatacctgtgctgataaactgtataggatgtattaattaggatggtatagaaccacagcagcttcagtctataaggtggttttgtttaaaagtagggaaggctgggcatggtggctcacacctgtaatcccagcactttgggaggccgaggcgggcggatcacgaggtcaggagattgagaccatcctggctaacacggtgaaaaaccctgtctctactaaaaatacaaaaacaaaaaaacaaaaacaaaaaaaacactagccgggcatggtggtgggttcctatagtcccagctactcaggaggctgaggcagaagaattgcttgaacctgggaggcggaggctgcagtgagccgagatggtgccactgcactccagcctgggtgacagagcgagactccatctcaaaaaaaaaaaaaaaagggaaaaggaaaaatcagaacaaagaaattagcaaagcaacagggctcatttcctgtttgtttggggtaggaagctgtattcattttattcttctgatttccaaagaaaaacatttttgtgggcccgggacactgtgcctactgggttaagtaggccttggtcagtagatgaataatgagctaagtgatcaagttcccatgtttcaatctcacatctataactgaaaaatgtatatccattcaatggggaccctttttctcacacacaaagcacatgtttacagcagacaggctgagaaacatatcatctgcagccaaacaactaaaaaaaaataccatgacacagtcaagaatcataaagtttactgtttcttttccatcatttggcacatatccaaggcacattagaaaattagaaatcataaattactttgtagaaaaataatccctcccttccttctgtacatacacaagtatttccaagaacatggacaaaaccatttccctatcacaaggtcatttgaaaacggactcaggacaaacccatatacgtgtagctctaggccaataacataaaaataacagtataatctatagaaatttataaaaaggaataaatggcaataaattctaaccgaaagtaactctgacctggtttgtgctgttaagttttgaatttgaatcaaaagactaagaaaagatgtgccaaatctactctctaatccagtaaccatcccgtcaggtgtgagtgtgacagacattcaagggaggttctcaacaaaaagggatgtttctagaaatactgctacaggtgcacgtgtagtaaccgaatatctgtacctacttgttagaaggaaaatgataaccaccctttcccatgtgcatgatgtggaacaggtctgatgcatcctttcactaaaatgaatatcaaaatgggattgaggcatcttttggttcgagtgttgctttgcaaagaaacattgtccagctgctgctttcttccttcagatatgacatttcagcctggcctctacagtaccatgaaacctaaattacttacttctctccagcttaatcctaggtggaggaattctagctgtggtttgtgaatgtacacaggtcagagaggtttagcaccttttgggaggaggaggtcagaatgcggtggtgaaacctctcccactgtgaccaacaaaccctcatacttaaaaagaagcatgcacctctggcttaaggatctggatgctactggaatttttgtctgtttcaattgtattcattagctttgaagaggagagagatggtggtggttaacttttttgttgcattctttcctgccacagaaaagctttcaggaacttggtgctgaagacttctcaagccagtctcatggaagcacatttagttctcagatgtgttcacgctcagcatcatcttgttgcatccttgcttcctagcagtgggttcaacaactcctcattcctgttaggaccgggaagcactaacctcttggggagtggagagggggccagcagcctccgggccctgggacacgaccgcatcctctaccgtgtgtctccgcagcatccgtctgtgtccagggccagtctgtgtcagtccaggcctctctggccagtcgctgttgcctttctcagcagcatgagatccactctgagctggcaggttattctgtctcagtgtgacactttgcctccctggctaaagaaaaagtacatttttaaccgttgacgtcctcactgtactggaagccacaaccatgacagtgacagctgccccttagtgcctagtgtcacataatgtgctcagtgcttgacaggcataatttcaattctcacatccctgtcgtggtaacatggcatgtgcatactacatgtgtcagagtaaatgtttcacttgttttcacaatctttatgactctaggaggcatgtactactattgttatccccgttttacacctgaggaaacaggatcagcaaagttaagccacctgcctaaagtcctacagctagcaagggaaaagctagcacttgatggaactcaggcagatttcaacgattctggctttcccacaaagcagcaggtctcctagcaacaccacataagactaaatatggtatcaaaattagtcatgttaattaaaatcattttaattatctaaaacaatttagaacttttgtgtatttgttccaacaagcctatgctacatatgctataaattctcatcagcaacaaggaaagctgtggttctgagaagaatcactgtctccgatcacaggttttcaatcaagcttctgagtgatttaaaaatgcagtagggtccgggcacggtggctcacacttgtaatcccagcacactgggaggccaaagcgggcagatcacttgaggtcaggagttcaagaccagcctggccaacgtggtgaaactgcgtctctactaaaaatacaaaaaaattagccaggaatagtggcacatgcctgtaatcccagctactcaggaggctgaggcgggagaatgcttgaacccgggaggtggagactgcagtgagccgagatcgtgccactgcactccagcctgggccacagagcaagactctgtctcaaataaataaataaaaaaatgtagtgggaagatggccacataaagaattgtctgagcaactgtacaccatacttggagacatcatttacccatctatatacaaactgtcgttttctttctttggtgattaaaaccatagtgaaatgtgggatgtttcatctcctataagcaccaagacctgtggtttcccacacatgtaacactttccactcctctgctcagaaatgtacttttagttataacaatcagtgaagtctgtactctacactgtcccatgaaataattccagttttaactgctgctaactcatacggcgcacggaataatgaagatgacgatcaaggagacgtgtttaccatggattacttttgacaaagccgggctttagaaaatatgattaaaagccagtgtttaataacttacctcatgcaaagaaccttcggttaaattagggacacttctatctcttgccataatctcccttgaagtctttcccctaaaacccaaaataaacgaaaataaatatttgggacagtggcatgaaacactctggttggccacaaggtggcagcatttttgacattagtaggtgcagatttgtccataaccaattacaattgaagcagcttacgtgcagcttggagtaaactaggggcaaaagcacagaaatcaacttgagtttcatactcacttaaactgaccagctgagtggacaaagtaaaactgtcttgtaaaaggctcatctggtagatcatacagttttgagttccctgtagataaaaagataaacatctaaaaacttcaaaaacagttgtaaagattattttaaaattacagcacagacacaatctttctattctcagatttacaaaatttagaaactgaagcactgaatttgcttaaagaaacacagctagtacctatttataacaggttgagtatctccaatccaaaaatctaaagcctaaaatgccacaggctgggtgcagtggctcatgcctgtaatcccagcagtttgggaggccgaggtgggcatatcacttgaggtcaggagttcaagaccagcctgggcaacatggagaaaccccatctctacccaaaatacaaaaacttagccaggcgtggtggcacgcacctataatcccagctactcaagaggctgaggcaggagactcgcttgaacccaggaggcagaggttgcagtgagccgagattgcaccaccacactccagcctgggcgacagagcaagactccatctcaaaaaaaagctacaaaatccgagacattttgaactctttgacttcatgctcagaagaatctgatttcctgatttggatcctcaaccaatgagtataatgcaaatattccaaaacccaaaacactgctggtcccaagcatttgagatagggggtagtcagcctgtattatgagaacccccatgaaatagaaaaataaaaccttaactcccttaactcccccagccacaaccaattacggtgagacagtctcagggttatcgagatatgtgaatgggtttatccatattattgtattgcattattgcatacctcactggataatatttcatattgtaaattaaaaaaaaaagtagaacaaggaccccttctaaactttttaaaaagaagaaaatacttcagtctcactgctgttcggcaactgctgttttaattataatcaacctccgtacacgtacaaacttaaaaaaaaatcttgaggccaggcgcggtggctcacacctgtaactccagcactttgggaggccaaggagggcggatcacttgaggtcaggagtttgagaccagcctggccaacattgtgaaaccctgtctctactaaaaatacaaaaattagccaggcatggtggcacgtgcctgtaatcctagctactcgggaggctgaggaaggggaataacttgaacccaggaggcagaggttgcgtgagctgagattgcaccactgcgctccagcctgggtgacagagtgagactctgtctcaaaaaaactaactaaataaaaaatcttggtggctcacacctgtaatctcagcactttgggaggccaaggcgggcagatcacgaggtcaggagatggagaccatcctggctaacacggtgaagcccctctctactaaaaatacaaaaacaaaattagctgggcgtggtggctggcacctgtagtcccagctacttgagagtgggaggcagctacttgaggcaggagaatggcgtgaacccaggaggcagagctggcagtgagctgagatcacactactgcactccagcctgggtgacagagcgagactctgtctcaaaaaaaaaaaaaaaaaaaaaatcttgaaaggtagcatttaccctggatgtccaggaaatgcccagaacacctgactttggaacatgaggcatgaaagaaactatcccagagactgttccccatctccataggcagacacctgaaccttcaaggtagtgttgacagtttctatcctatttcctcaggaaacatcattaccatcaaccagaaaactagtaacaaaaaaagcttacccatagtctgataaattgggaggtaacatacatttctttggtgcctgtatctcctccaggcatgattataattacactttacatatacaattaaatgaacaccagcaactactcatgaatgtctaaatatacccaacttgagcgtgacagaaagaacgtaaactcttacattttttcctgatcttaacagtgacatactccttgcggtcagtttcagccacatcatctaatgaagcaacacagcttggtaccacctgaagcaattccattatttttgaattctgcaatttgaaagggaaaaggaacagtaatgtttttattcttttttaataggttattatttgtttttgatctaaatgtcagtattagtgtgactgggcagaaaaagctcagaaataattacaaatggagcttggaggccataaagcccagtggtaaaagcaggcctgcatggggagcccggctctgcttttaccactgggtaaaagctctgccctctctgtggactccacgctggggattcaaccactccatgcaaccagctcaaccataataagatctactatcatatgcttatcatgaggctgttgagggcccccatatagtaagtactcattgaaacacattaattaactgggcacggtggctcacgcgtgcaatcccaccactttgggagactgaggtgggaggattgcttgagcccaggtgttcaagactagcctgggcaacatagcaaggccctgtctctatttaaaaataataaaaggccaggcgcgatggctcacgcctgtaatctcagcacttttgagaggccgaggcgggtggattgcttgagcccaggcagtcgagaccagcctggccaacatggcaaaaccctgtctctattaaaaaaaaattagctggtcatggtggcacacgcctatagtcccagctacttgggaggctgaggttggaggatcatctgcgcccaaaggttaaggctgcagtgagccaagattgcaccattatactccagcctgggcaacaaattgagactctgtctcaaaaaataataataataataaaattaaaaattttaaaaaccaaaaaaaattcaacataatcatttaagaaagtactaaactgagagtttaaaatatttcaattctgtcactgaaaattaatataaggaggccaggcacagtggctcacgtctgtaatcccagcacttcgggatgccaagggaggcggatcagttaggtcaggtgttcaagaccagcctgagcaatatggtgaaacccgtctctacaaaaaatacaaaaatttagccaggtgtggtgccacgtgcctgtaatcccagctactcaggaggctgaggcacgagaatcgcttgaacccaggaggcagaggttgcagtgagccaagatcacgccacaacagagcaagactctgtcttaagaaacaaaaaattactctaaggagcctgtccatggagtggattgatggtgatgttagcttctcagttgtgtcacttaacagcctactcgctgtctatcttgggtagaaaacaaaagaaagactcagcaggaaaacaggaacagaaagagctgccgctcgccaggggaaaaggacccttccccgccgctctccacgcaagcatccacagcactggagaaggcagtaggccaataatcacgattcctacaggactcaaggacttttactttcatttttttgagataaagtctctgtcacccaggctggagtgcagtggcacaatctcagctcactacagccttgacctcctgggctcaagcgatcctcccacctcagcctcctgagtagctgggactacaggcatgcacccctatgctcggctgattttttgattttttgtagagagggggtctcactatgttgcccaggctggtcatgagctcctgcgctcaagtgatcctccttccttggcctcccaaagtgctgggattacaggcatgagccactgtgcctggcctcaaggagttttaaatccaccaacaaaacaaaccttctccatcgtgctgctaagacaacggctgtgttcacactgtgaggatggtgacaccagaacatcatgacttgctccttcctgagtgcctgactctatgtaactaccggaccacagccctactgctagctgaggggggggcccctccactcaggcctttgaaaaccacctgtgaaaagaatgattcctggttcccagagcaccacctctgaccaggagactgaggaccagccatctacccacgctgtggacttctggcacaccaactacgcccagcccggcgatgccaagggccaggtgttgctattttagatccagcttaaacaaagggatccagagggagctgtgaggagctcaggattccctcggctcttcgaccctctccacctacctgttcagcacagtctacagccgtgcgctgccgcttgttcagcacctgaactgacgctccgtggagcagaagcagctctaccacgaagacgtgcttttcaatcacagcctcgtgcagcgctgtgttgcccttattgttagaagcgttaatggaggccccgtgctggaaagagaaaccacacgatcaaaaggaacgctacgaaacgtcagcatggaatctggctgtgggtatacaggtattcgctataaaacacattgttttttttatgtctgaaagtttccttaaaatttggggaggaaaagtaatactgagaaaaaaagatttatagacaaagagttcgctgcagcatttatcctaatagcagagaaaacagaagccacttaaatgtacagagcagaaacaggttcaaaaaaatcactatggtatatccatagttatgcaaccattaaaaatcaaagtttgagtaaataagtttctacattaaataacattaagacagaaaacaatacttggggccaggcacagtggcccatgcctataatcccagcactttgggaggcagaggcaggtggatcacctgaggtcaggagttcaagaccagcctggccaacatagtgaaatcccatctctactaaaaaaaaacaccaaaaaacaaaaaaattagctgggcatggtggtgggcgcctgtagttccagctattcgggaggctgaggcaggagaatcgcttgaaccccggaggcagaggttgcagtgagctgagagtaagccactgcattcctaggtgacagagcgagactccatctcggaaaaagagaaaacaatacttggcgaggccccgtggcttacacccgtaatccagcactttaggaggccagtgcaagaggatcgttggagctcaggagtttgagaccagcctgggcaacatagtgagacccccatctctactaaaaacaaacagcaaaaactagccaggtgcagtggtatgtatctgtagtcccagttagctgggaggctgaggcacctgagcctgggagactgaggctgcagtgagctgtgagggtgccattgcattccagcctgggccacagagcaagaccttgtctcaaaaaaaaattaataaataacactgaaactatacacatttgtcaaaagtccaccataatgagtttcccttgagtagcacagtcatggacaggttggtttttccctacttctttaagaaattctaatgcattcacataacctttttcaagagcagcagggacagaggcggccactcagcccatgctcaggtaacagcgtgacacattcccggtcggtgaggtgagacccaaacccttggcaaaagcagcgtcggagcccttgagaccgcatcccagatgctggggcaccatctgttcccatcggagaaccccgtgtgggaagacgcacgccctgctcctctccccagaggcctggggttgatgggtggccgggcctctccatccccagtgcgctgcgggggtcgctgggtggaggcgccctgttaactggcgcaggtgtgtagaatgaggacaggaaggggccctcacctgtagcagcagtgccacaagctcgtgatggccaccggagcaggcgtaaatgaggggcgtgtttccactgaggtccttcttattgggttttgcattcgaatctaacagacacttcaccacctgggccagagaaggaaaacgtgcaaacttaatcaaaatttctgtcatttcctgccagagaaaaattatgaaaaataaataaataaataaataaaataagaaaacaaagtttctggagagaaatgctcaagtttgatattcttttgacttgtctctgagcttatttttttgttgttgttctttttggtttttctttcttttttttttttttttttccagacagagtctcgctctgtcgcccaggctggagtgcagtggcgtgatcttggcttactccagcctccgcctcccaggttcaactgattctcacgcctcagcctcctgagcagctgggactacaggcgcctgccaccacgcttggctaattttctgtattttcagtagagacggggtttcaccatgttggcagggctggcctcgaactcttgacctcaggtgatccacccgtctcggcctcccaaaatgctgggattacaggcatgagccaccacgcccagccgtctctgagcttattgagaagactttagactctcaggagaaaagggaccaggtgaagaggggagggctaccatctgctgcggggctgctctgtgcggttgaagcgcagggtgacagtgatctcacttcacccgatgtgctgggcgacagtgatctcacttcacctttctatcctttctacctcagggagagctgcaatcgccactccgaatttacagattaggaaagccatgcctgaagctctatgctaggtgttggcgagagagatgcaagacctgaaatatggctcctttctttaaaaagttaacagtagaactgataaaggaaaatgaaaaaatatacacacagttttccttaaagaaaagcagggcctggtgctgtggctcatccctgtaatcccagtactttgggaagccaaggtgggaggatcgcttgagctcaggagttcaacaccagtctggacaacatggtgaaaccccatctccacaaaaaaaaaaaaaaaaaaaaaaaaaaaaaaaaaaagaaaaatttatctaggtgtggtggtgcacgcctgtggtcccagctactagggagggaggctgagatgggaggattgtttgagcccaggagattgaggctgcagtgtgagctgagattgcaccactgcactcccacgctccagcctgggagacagagcaaggtgatgtcttaaaaaaaaaaaaaaaaaaaaaaggcaaaaaaccccagcactttcaaaaagttaatcactccaaaattcaaaattcttccttgagcccctctatggggccctgactgttctttatgaagtgctgaactgtttggcccagagcaaggcactgtcggggtgtaaaggtggtaagatgaccatggggacagtgctcggtggccaccacacgagctcaagagccagatcctgctgggggcaagaatcagaatgacaacctcggtatcacccagatgggagtggcagtggggcagggactggctccacccccagggagcatcaaggctctgtgctccgaggctgagtggcctaccgtgtgcacctcagaatctcagggctcgggggagcagtgtcctccagggtagccaccaaacccctgcagcgttcctaccaagcacaaggtcctagcccaaagcagacaccctgctccaccacccccaacacacagcccgaacctgaaagtggccctgctggcaggccaggtggagcgggacggcttggtctgcgttcctggcacctgcgttggccccgtgcttcagcaggagggggatgaggtccgcccggccgtgcagggcggcgacatgcagcggggaggagccgtcctggctggtcacgttcacaccaagcccactggcaggaaccttcgccagcctctgggaagcgcagaagatggaaacacaaacgtcatcagtattgaagaaactgggctggagtgattggcaccatgtgccccccacagctcccacacacaatgcgggatcatggcgggatccaggatggattccaatttgtttagaagtatgtggcatgccaaaaaacaacttcctttttttttttttgagacagggtctcactctgttgcccaggctggagtgcagtggcaccaccatcatggctcactacagcctcgacctcctaggctcaagtgatcctcccgcctcagcctcccaagtagctaggtccacaggtgcaagccattgtgcccagctaatttttttttttttttttttttgtagagatggggtctcaccagctggcccaggctggtcttgaactcccaggttcatgtggtcctcccacctcagcctcccaaagtgctgagactgcagatgtatgccactgtacctggctaatttcacttttttttttttcaccagggctgtagagcctccaaatttcctttgaggggcatggccacagccccgcaaaggcgacgagattcacttgctgtttgcacctctgtttaaaccaccgctataagaaacagtgattcttgggtttaggtgagaataattttactttttgatgattaaaaatgttacctctttaaaaaaaaaaactgtatgctaaattaaaggctgaattttattatatgtaaattatatctcaaaaataaaaaagaagctggaaaacacacatgtgcacatacatacacacactaaatgaaataccctgcatatttatcagaatggctaaagttaaaaactcaaggctgggcacagtggctcatgcctgtaatcccaacactttgagagtccgaggtgggcagatcacctgaggtcaggagttctagaccatcctggccaacatggtgaaaccccgtctctaccaaaaatacaaaaattacccaggtgtggcggcacctgcctgtaatcccagctacattacaggcatgcattgggctgtagaatcgctcaaacccaggaggcgaaggttgcagtgagccaagatcacaccactgcactccatccagcctggctcactgcaatctctgcctctccggttcaagcgaattctcctgcctcagcctcccaagtagctgggattacaggcgtgtgccaccacacctggctgatttttgtatttgtagtagagacagggttttgccacgttggctaggctgggcaacagagcgagactccatctccaaaaaaaaaaaaaaaagtcaaaataccaaatgttggcagggatgtggagcaactggaatgctcaaaccctgctggagggaacagaaactactccaaccactttggaaaactggcagtttcttttaaggttaaacatatccttactatataatccagcaattatactcctaggtgtttacccaacaacgtatatatccacacaaaggcctgtaactcctaggtgtttacccaccaacgtatatatccacacaaaggcctgtacacaaatgttcacaatggctttatttacaaatccagaagcaggaaaactactcagatgtccattaacaggtgaatgaaacaacaaattctggtgtgtccacccaatcaactactatccagcaatgaactcctgatccaacatgggtctcaaaaatatcctgagtcaaagaaggcagacatgaaaagggacatgcgttagaattccacttacaaaagattctcgaaagtgttaactaatccatgatgatgaaaagcaggtcacgggttgcctgggagaggcgatgggggaatgggggggtcatagtgggggggaaggcaaaatctcacaggaaactcttgcaagtgagggaaacgttgtgtatcttgatggtggtgatggtttcacaggtttatatatctgtaaaacttgccaaattgtatactttaaatacatatgctttatgtaaatataaattatataaattataatgtatataattatatttcaataaaagatttaaaaacaaattctaaaacaccactggagaccgggtgtggtggctcacgcctataatctcagcactttgggaggctgaggcaggaggatcgcttgggcccaggagttcgaaaccagcctggacaacacagccaagaccctgtctctacaaaaataaaaaaaataggccagcaaggtagcttacgcctgtaatgccagcactttcgggaggccgaggcaggtggatcatgaggtcaagagatcgagaccatcctggccaacatggtgaaactccgtctctactaaaaatacaaaaattagctgggcatggtggcgcatgcctgtagtcccagctactcaggaagctgaggtaggagaattgcttgaacccaggaggcagaggttgcagtgagccgagatggcgccactgcactccagcctggcgacagagcaagaccctgtctcaaaaaataaataaataaataaaataaaatagcccagcatggtggtacgtgcctgtagttccaaccatttgggaggctgaggcaaaaggatcccttgggcccaagagtttgaggcttcagtgagctatgattgcaacactgcactctggccttggtgacagaccaagaccgtctctaaaaaaaaaaaaaaaaaaaaagtttaggccaagcgcagtggctcatgcctataatcccagcactttgggaggctgaggcaagcggatcacttgaggtcaggagtttgagaccagcatggccaatatggcaaaaccctgtctctactaaaaatacaaaaattagccaggtgtggcggcatgcacctgtagtcccagctactcgggaggctgaggcagaagaatgtcttgaacccgagaggcagaggttgcagtgagccaatattgcaccactgtactccagcctgggcgacagagggagactccgtctcaaaaaagaaaaaaaagaagtaatacattaaacaccactggaggcctggtgtggtggctcatgcctgtaattccaggactttgggaggctggggcaggaggatcacttgagcccaggagtcccaagctgtaagtgagctatgattgtgccactgcactccagcctgggtgacagagtgaaaccccatctctaaaaattaaaataaaataaaataaaataaaataaatcactgggctagaagaggatggggggagtggattttcatttaatcacagacatgaagcagtttagtggtgtgtctttttgagaaatcacaaaaagagaataagaggttttagaagtacagggaacctaagacttcacccaattgagttccacagtattttactgtgtaattaaagtgggaaaacacagggaggagaaaaatggcaaaaacagcagcagcggagatgcagcaatctcgccacacacaggtactgagggcccgagggcttcatcacttcccaccagatgctagggaacaccatctgcctttcttatcctgtgttttcatagccacccacctcggggaaattgtgttctggaccatgtgcatccagcagcagggggccaggtcaaaaggtgcacatccccagtgtacatgttacctcacagctgaaaaatgtgtgagggaaaactttagtcattttcaatatccttagagtcacccacgctgaagttctttttagaaatggtaaaattatcctacaatataaaggctaacaccactctatctattttataaagtcaaatccattttcttttttttgagatggagtttcactcttgttccccaggctagagtgcaatggcacgatctcggctcaccgcaacctccgcctcctgggttcaagcgattctcctgcctcagcctcccgagtagctgggattacaggcatgcaccaccacggccagctaattttgtatttttagtagggatggggtttctccatgttggtcaggctggtctcgaattcctgacctcaggtgatctacccgcctcggcctcccaaagtgctgggattacaggcgtgagccatcgtgcccggccaaattcattttctattttctattttatatttttagtttcttagagacagggtcttactctgttggccaggctggtctcaaactcctggcctcaagtgatcctctaacctcggcctcccaaagtgttgggattacaggtgtatgacactgagcccagcctaattctcttagtatgggacatacacatctataattagatagctaacacatgaatgcatgctatgtatgcaataccatttacaactgcttgaaagaagatgaaatactgaggtgtacacttaacatgacacaggcaggatctgtatgctgaaaaaaaatcacaaaatgttgatgaaagaagtcaaagaaggcctaaatacttggagagatgtaccatgttcatgaagactcaacatacgttgagtcatatgatgttatttctccccagttcatctataggtttaatgtaattcctatcaaaatccgagcaaggtattttgtagacatacaaaaactaattctaaaattgatatagctcagaccagtctgggtactataagagtgagtaagttagtaagtaagcaataggtaaataaataaataaaatttacatggcaaggcacaggccatagaatagctgaaatattcctggcaaagaagaataaattaggaagaatcattcaatccaatactgaggcttactacacagcatcagtcatcaagacagcgcggtactggtaggatgggcccatagatcaatgcagcagaacagagaacccagaaatagatccacacaatctatagccaactgaggtgcaaaggcaagtcacgggaggaaggagaggcttttcaacaaatggtgctggcgcaagtggacacttgtaggcaagaaaaaacaaagaagaacctcaacctaaatctcacactttgagtaaaaattaacacaaattggatcatggacttaactataaaatataaaattataacttaaaaaaaacaggagaaagttggaaatctagagcaaggcaaagaattctcagacttgacaccaaaagtataatccataaaaggaaatactgacaaatgagatgtctaaaaacctttttctctgtgaaagcccatgtgaggaaattatagacaagctacagactgaaagaaaatgtctgcaaagcacgtatctaacaaatatccacatatctagaatatataaattcaacgataaagccaaaaacaaaccaattagaaaatgggcaaaacaaatgaacagacatttcactgaagaacatatacagatggcaaataagcccatgaaaagctgttcaacagcatcagccattagagaaatgcaaattaaggccacactgagatagtactacacacctatctgaatggctaaaacagaaaataatgaccacacccagtgctggggaggacgaggaggaactggatcactcatacatcgctggtgggcatgtaaaatgatacagcctgcttgggaaaagactgtcagttccttataaaaatgaaccatggaattgccatgcaatgaccatatgactccacaattgcactcttgggcacttatcctagaaaaatgaaaacttgtgttcttaccgaaacgtctactctaatgtttgttcgtggcagttttattggtaatattccccaaactagcaacaaactacatgtccttggacattccacagtgagtatatgccaccattaaacaaatggaatgccaccccgccatggagaaacagacctgattctaggcaacagtgtggaatcaaacggagtgaagaaagtcaatcccaaaaggattgtatactgtgattacatttatgtaacttttttttttttttttttttgagacggagtcttgctctgttgcccaggctggagtgcggtggcacaatctcggctcactgcaagccctgcctcccgggttcacgccattctcctgcctcagcctcccgagtagctgggactagaagcgcccgccaccacgcccagctaattttttgtatatttagtagagacggggtttcaccatgttagccaggatggtcttgatcttctaacttcgtgatccacctgcctcggcctcccaaagtgctgggattacaggcataagccacttatgtaacgtttttgaagtgacaggattagggaaatggagaacaggtaagtggttgccagcggttggggatggtggggtgggcgtggcagggagagaggtgggtgtggctgtaagagggcagtttgaatgattggtcttgtgagagaactgtgctttccggtgacagacacatgctgcgtcttgatggtggtgatggcttcacaggttttacatctgtaaaagctcaccaagttgtataaatacatagactttattgtctgtgaattatacttcgataaaggatttaaagaccaattctaaaacactgggctagaaaagaatggcggggtgggtttcaatttaatcaaagatataaagcagtttagtgttctgtctttttgagacattacaaaacaagaacaagaggctgtaaaagaacaaggaggccaggcgcagcggctcacacctgtaatcccagcactttgggaggctgagatgggcgaatcacttgaggtcaggagtttgagaccagcctggccaacatggtgaaaccctgtctccactaaaaatacaaaaaattagctgggcgtggtggtgggtgctatggtccccgctacacaggaggctgaggcaggggaatcgcttcaacccgggaggcagaggttgcagtgagccaagatcgcccgacagagcaaggctctatctcaaaaaataaaaaaataaataaataaaaagaacaaggagtatataaaagtatctgtcacagaaaatatcttgaatgtgatggtggatacataaacctacacatgtggcacaactgtacagaactacatacacacacacgagaacaagcagaactggggaaatctgaactaagatccacggattgcatcaatgttgatatcctggctgtgattctgtaccacagttttgcaaggatgttacccctggggaaagctgggagagggtttggggatttctctgcacttggagggagagtccccatgaagagtgaactcaactgagtaaaagcaacagcagaacatgcgtgcagcttccctggggggctttaggtacctggaaggagacccttgagcatctgttcataagctcctgccacgggactcaggggcccagatagcagccaaaacgctaatcatgggacacatctctgctcgcttacctgccacgcagggagctggcacccgccctaggctaatgagtctcaccatatcttggggaatacctattcacagacatgcagtacagtaattatctggctgagaaatcgagaactttcctgagggaaaaaggaagaatttgctggccaggagcagtggctcacgtctgtaatcccagcactgtgggaggctgaggcaggaggatagcttgagcctgggaggccgagaccagtctgggcaacacagaaaggctgagtctctacaaaaagaaacaaattagccaggtgtggtggtgcatgcctgtggtctcagctagtcaggacactgaggtgagaggatcatttgagcccaggcggttgaggctgcagtgggtcatgactgtaccactgcactccggcctgggtgacagaacgagaccctgtctcaaaaaacaaaaacaaaaacaaaaacaaaaattgcctacattccctgacctccaccaacagaaacaaagccaaaccttctgagctggggcacacttggggcactggcacaacgggtgacagaattcggggtccgctgcactgacagtgtcctccgcatcctccaggtcctcctctgtccattccaacaggtaacgcacctggtgatggagagtaacggaaacaggaacacatcctcagcgtctttgcatgcacaatatcttaaacacacaccatcaaccgttcccaatcagggcccacgcttccttctccaaccccacagccatttataaccggcttctgctccctcatgaagccttcctcagtccttccacttcacagcttatgccagagattattttcttctatcataaaaaaggacaggaagattggtgctgcctcagggtgatggctttaaaactctagtcctagggctgggcgcagtggcttataggtgtaatcccagcattctgggaggcagaggccagagaatcgcctgagcccaggagttcaaggctactgtgagccatgatcacaccatagcactccagcctgggcaacagagcaaaactctcaaaaaaataaacccatcctggtcctagggcacttagtgagcacctcactccctcctccattaaaagtggaagatacgggcaggcatggtggctcacgcctgtaatcccagcatttggggaggcctaagcaggcagatcacctgaggtcaggagttcaagcccagcctggccaacatggtgaaaccccgtctctgctaaaaatacaaaaattagctgggtgtggtggcgcatgcctgtagtcccaccttctcaggaggctgaagcaggagaattgcttgaacccaggaggtggaggttgcagtgagctgagatcatgccactgcactcctggatgacagcgcaagactccgtctcaaaaaaaaaaaaaaaaaaaagtggaagacacagtcctttcaaagggccaaaggcaagccaggggaacctgtccgtcagaatctaaggaaggctgtctccaatgtccactcatttcactgtcagatgtacctaatggttaggaaagacgccttccttcaagccacgacattctctccaggtgccagcccagggctggcggctccatctttatccagatacctgcttatgactcctcagagcctcaagcctcaggccccctctcgtggcccaggagtcccagctgaccacagcttctgcagaacctcacaaacaccactgggctctgccttcgcctctctacttcctcctctccccaagacgctgccctctcttaaaaccaagctgccctccttgcacactggctagtgggcctgggctctgagcccacactctgtgcctcggacatggtctctggtcttggcaacgtctcatcacactcctggagtatggacatctgaaaggcagggcccacactcgctatgtgcctgtatgttgatctgcctcattacttgtcaggaaaatataacaacaccattaccaaatatgcattaaacatagcgccctctgcacaaaatcagagtccacatggcccgaaactgaaccggagacaagaaacacaggtgggtggctgttttaagctagaacaagctttttataataaaaagcacttctaaagctgggcagggtggctcacacctgtaatccaagtactttgggaggccaaggcaggagaatcgcttgaggccaggagttcaagatcagactgggcaatatagcaagaccttatctctacaaaaaatttgtttatgattagccaggcatggccgcgcacaactgtggtcccatctattcaagaggctgaggcaagaggattgcttgagtccaggagttcaaggctgcagtgagccatgatcacgccactgcactccagcctgggtgacagaacaagaccctgtctctaaaaaataaaaataaaataaaaagcacttctaaaaactcaccatttctagatctccatcagcaactgctctcaaaagtttttctaccttaataaaaggaacaagaatgttagaaaaatgatttcaacaataaaataataatagaaataatataaacattctgaaaatctattggcttgatttgtggacttttaacgtctgatttagttttttttttttttttttgagatggagtttcgctcttattgctcaggatggagtgcagtggcgcaatctcggctcaccgcaacctccgcctcccaggttcaagcgattctcctgcctcagcctccctagtagctgggattacaggcatgcaccaccatgcccggctaattttttttgtatttttagtagatacagggtttctccatattggtcaggctggtctcaaactcccgacctcaggtgatccgcccacctcggcctcccaaagtgctggcattacaggcgtgagccaccacgcccggctgatttagtatcctgtaaatgtgtccctaaaactgctcagggagggcatcctaggaagttgctggtgtgcgcagaacccactgccatttagggaataataaactgtaactttatcagtggaattgtataaatgtatatgtatatttatatgtatatacatataaatgtatatttatcagtggaaaggtgaggccatggtcgccttggaacacaagtccttcctaagacgccagccacccctatgatttagaaaaatacacttagctaagtgcagtggctcggcctgtaatcccagcactttggaggcaatccccaggagtttgaggttgcagggagctatgactgtaccactgcactccagcctgggtgacacagtgagaccgtgtcccaaaaagaaaaaaaaaaaaaaaaaaaaagaaatactgaactcagctatcagtatctgctagctgggacaccatgagggtggacacccctcccagggacaacttcaggtctccgttagactctggaccatgtctcttggctgtctctgctatggctttgcatggagctaagctcacttggtcctccaagagcatgtcacggcttgtgggtagtgggacactatggtagggtcagtgagggttcagcacccatgggggggccatcgaaggtggtacatccattcaacagtccactcctcagctaaagaatgaggcagatctggccgggcatggtggctcacgcctgtaatcccagttacttgggaggctgaggcaggagaattgcttgaacctgggaggtggaggttgcagtgagcccggattgcaccactgcactccagcctgggcaacagagcgagactcttatctcaaaaaataaaaaataaaaataaaatgatctgaaatcagcggacttctacatgacctgacttgtcttcttcttagcctatcctctctttaatacacaaacgcactctaccacactaattgctgctcagggagtggtccatgaagggcacaccaaaatatacagcaccgcgagatgctgctgggcccagcttgaaggcaccaacctcggccaccacagagcagcagcggcctcagcatgggcaagcaggctgagagggcggcccttgtcaggccacggctcttcagctggacaccactgcccagggccgccaaggcctcccctccccagcccttcctctggaagcctcacctctctgtagtccttcttggtctcctcctgccttgagctggctgacatggaggagaagctggaagtggaggactcttggctgatggagtccacggagcgctgcggggactgcacaggggcctgcagccaaggagccccaacgagagagaggacaggacacaaggacacgtgaggaccagagaaggcgcccttggtctccaaggtaacctgacctgctcagcccggctgacttacctcggacgacttctgcctcctctcgaaggacaggtgataggcttccattacagacagaatctagggggacaagggggatgccaacagtaccccgtgagatgggggtcgtctcagcacagtgccatcacccacacgccccactgccggcctagctcctcggaatgtcagtgcagtgagccttaggtcacgtggcccagtcgcacccttggatagacagaaaaaccaagacccagagcaggtgggaacttacgcacgatcaccccgaagtcggggcttcctcccttcacggctcctcctgtcccgtgggagggctcagggcttcccacgcatggacgcaagggataagagaagccagacccgcatggagcctgaaaggtgactgcatccagcccccaggcctgtctgtccacaggcatgaggtgtggcctttcctctagcacccacaggtctcaagtaggaacagctcagagccaagccgagaaggcagcctctcttttcctctgcagatctccctctggaagggcctttggtaaacaaacgccacggcaatagaaccctcctcccaagacatcccagcagccccagccgtggtggcactgctcagcccagtcagctctgcctgccagaaagctgcgaccttggcagtattcagggggtacagccggaggcccctgaagccagaaacagggatctaacccttcacaaactgtgctttactgtagttcttatgctgtgtccctgccacacacacacaaaataatttaaaaaaaaaaaaaagagggaagccgggcgagatgacccataactgtaatcccagcactttgggaggcctaggtgggcagatcacttgaggtcaggagttcaagaccagcctggccaacatgatgaaaccccatctctaataaaaatacaaaaaaaaaataaactagctgggcttggtgacacacacctatacctcccagctacaagggaggctgaggcaggagaattgcttgaacctgggaggtggaagttgcagtgagccaagatcatgccactgcactccagcctgggcgacagagcgagactccgtctcaaaaaaaaaaaccaaaacaataaaaaagaaagatgaaagcaggggcggtggctcacacctgtaatcccagcactttaaggggccaaggcgggcagatcacttgaggtcatgagtttgagaccagcctggccaacatggtgaaactccacctgtataaaaaatacaaaaattagccgggtgtggtggcgcatgcctgtagtcccagctactcgagagctgaggtgggaggatgccttgagcccaggaggcagaggttgcagtaagctgagatcgcaccactgtactccagtttgggcaatacagccaaaccttgtctcaaaaaaaaaaaaaaaaaaaaaaaaaagagaacagaagtaaacttttggaggtgatggatatgtttatggcgtagatggtggtgatggtttcatggatgtccactcttctctaaactcatcaagttgtatacactgactatatacagctttctgtatgccaatcatgcctcaataaagaggtttagagaaaacaaaaataaaaacaaattcaaactgtgctactccaagaataagatgtgaacaaactgaaagaacaacctggaagagctggaaattataaaagggagcagtaaaacatcaaaaggcagaaagctggccaggcgcagtggctcatgcctgtaatgccagcaccctgggaggccaaggtgagaggatcacttgaggccaggaatttaagacaagcctgggcaacacactaagatctcatctctattacttttctaaaatcatatattttggggctgggcgcaataactcacacctgtaatcccagtactttgggaggccaaggtgggtggatcacctgaggtcaggagttcaagaccagcctagccaacatggtgaaaccccatccctactaaaaatacaaaaaattaaccaggtgtggtggtgggcacctgtaatcccagctgctagggaggctgaagtaggagaatcacttgaacctaggaagtggaggttgcagtgagccaagattgtgccactgcactccagcctgggcaacagagcgagactccatctcaaaacaacaaaaaaaattaaatatttttgtaaaaaggcagaaagtcaggcctgtacaaacggggctcccctagagacctggagtggaacagaatccctcaggggagcctcagcttgcagatattctggacgtccatgctggggtctccatttcacagggccctgtgctccccctggtcagtctgccacatgcctctctaacgatgccattcaccagctctgctgccgggagacgagagtgcagagaactggcctctgcgagccacctccaagccccactgactcacgagaggggagcacttcacaacatgctccccaaactatgtctccagaaattactaccagaaaaaggtgagctcattaacaaattatgtatgaaagaaaccacactcgatgtccagaactggccgagtctcaataaagactctaggcattgaaggtgaagcaccgggaaaaaagagttccaacacatcctgctccctccccagtccctgcccctgcggagcctcgtttctacccactccatttgccaataaatcaatagcactcggcagccagaacaaactctgcctgcaggagttcctggaacaaccctgagaaaaacgcccactcaaaccaaaaataatatatcagtaaaacccattaatgatgacgtcccacatgcggcagaaagggtgcaagccaagttctgccctcaggcaataatgcacaatttgtctagtaggccaagacctaagctacggacatcgatcttctttcgaagtcatcttgcccctcagagatgggaagagctacctttgagtttaatgcacacttgaggggcgtctccttcagtctgttctggatctcggtggacgctccgttctgcagcaatgtctctatgacgccttggtagccccagcgggcagcaatgtgtagaggggtgtctcctttctcattgccaatgtcaagtctgcacgactccacgtcgtagtaaaccagagccttcacacactgcaaagagatggggaaatggcatcgctcatggatgtaccaagcctcgacaaggtccgtgctctcctcgacctcctcaccaagcaaatgtgcagtaacagacagaactcagaagtgtcacagtatctgatcaggacacctcattctcattcattttttttttctttttcttttttgagacaggatctctctctgttattcaggttgcagtgcagtgatgcaataatagctcactgcagccttgaactcctgggcttaagcgatcctcccacctcagcctcccgagcagctgggactacaagcatgcaccaccatgcctggatggtttttttttttaattttttttttttcctgtagagacagggtctcactctgttgcccaggcaggactcaaactcctgggctcaaaaaatcctcccacctcagcctctcacagtgctggaattatagatgtgagccactgcgctcagccaggacacctcatgctttcaaaaggatgaaactgccaatcaataagaagtggctgcaaaaactgtgatgtctccatgtacagaacagagttactacagcaggcctgagactgctaaccactgagaggcctgcttgcaagactgcctgttggcctgaaacattctatgggtgcctggatgtggggagtgttcccaaaattccctaactgattaggtggctcacactgggcctgaattgttttatacaatgtggtttatgctgaacgcccgagtttcttctgggagtatggcattttggtacatgctgtccagaaggtgcttacaggactagccttcattaactcttggggactgagttcctaatgagcttcccgagtggaccacacttcctgtgtgttgttccaactcactgctggaagaactgagcccatcctgtgtgggtccatgaaaagagacctgttgttttttttttttttttgagacacagtctcgctctgtcgcctaggctggagtacagcagtgcaatctcagctcattgcaacctccgcctcctagttcaagtgattctcccacctcaacctcctgagtagctgggattataggtgtgtgccaccacacacagctaatttttgtatttttttagtagagacagggtttcaccatgttggccaggctggtcttgaactcctgacctcaggcaatttgccggccttggtctcccaaagtgctgggactacaggtgccagccactgtgcccagccgagagagactgtttgaagctcacccctgctctcctctctggactccaccacgtgcctgttccctttgctgatgttgttctgtgtccttctgctgtaacaaaccacagctgtgagtgcgactatatgctgagttctgtaagtcctcccagcaaatcactgagcccaggggtggtcttggagaccactgacacaacacacgatagatcactgcagctattaaagaatgtgctagatggccaggcacggtggctcacgcctgtaatcccagcactttgggaggctgaggcaggcggatcacttgaggtcaggagttcaagaccagcctggtcaacatggtgaaaccccgtctctactaaaaatacaaaaattagctggatgtggtggtatgtgtctgcagtcccagctactcaggaggctgaggcaggagaatcgcttgaacccgggaggcagaggttgcagtgagccaagatcgtgccattgcactccagcctgggcaacagagcaagactccgtctcaaaaaaaaaaaaaaaaagaatgtgctagatcaacagggactgacctagaggatctctgtaacgtagagctaagttaggaaagcaagtggcataaaagcatacagggcatggtgtcatcttcatacatcaaccacctggccaggcctgagccccacacacgtgtgtaaatctatccatatatcactatggagagaagccagaaggagggcgggtaggaaaaaataagcacatagtggtgaaacaggacgtgaaaatggaaattacgcaattcttggatatcattataaaagtgaaccagaaatggtggctcatgcctgtattcccagaactttggaaggctgaggtgggaggattacttgagttcaggaatgtaagaccagcctgggcaacatggcgaaaccctttctctacaaaaatataaaaattagccaggcatggtggtgtgtacctttagtcccaggggaagctgaggtgggaggatggcttgagccaggaggctaaggctgcagtgagccaaaatcatgccactgcactccagcctgggcaacagaacaagatcttgtctcaaaaaaaatttgtttttctaattttaaaaagtaaaaaataaaggccaggtgcggtggctcactcctgtaatcccagcactttgggaggctgaggtggaagatcacctggggccaggagatccagaccagcctggccaacatggtgaaaccccgactttactaaaaatacaaaaattagctgggtgtggtggcacacacctgtaatcccagctactcgggaggctgaggtgggagaatcgcttgaacctggaaggaggaggttgcagtgagtcaagatcccatcgttgcactccagcctaggtgccagagtgaggccctgtctcaaaaataaataataagtaaataataaaaacagaaaatgtaaaaattgaatatgtacacaagtaagaaccagacggtagcaaggagaaatgaaaatgatttgacttcaggataagataatgagtgacttgttttaaactttgttacttcaatatggcatctgtaatatattaaacattctctttttttttttttttgagatggagtctcactgtcacccaggatggagtacaatggtgccatcttggctcactgcaacctccacctcccaggttcaactgattctcatgcctcagactcctgagtcgctgggattacaggtgcccgccaccacgccctgctaatttttgtatttttagttgagatgggggtttcaccatgttggtcaggctggtctcgaactcctgacctcagatgatctgcccacctcagcctcccaaagtgctgggattacaggcgtgagccaccgtgcctggcctaacattctttcatattaaaaaaatttacacacccaatgttccaataattatcgacacaaaatacattaatgagaaatcccgacttctctacgagtgggaaagggtgaacgcagcccccccggaacagcaagagccactcacgtcctcgtggccgtaggtgcaggccaggtggagtggcgtattcccattgttgtcctgcacttccgcgctggccttgtagtgcagcagcagcagctgcggagataaaggaaagcgatgagcagggcacagccggctccctgggaggcccggcctccagtcttagcagggggaggtcatttgctcccatcttcgatcttatttatgctactattcaaattaaaccaacacccatcattcctgacacttgagagactgaagaaaaaagtctaaagccccaccttttcttcccccatatgatcaggaagtttttctttttagagaactcagcctgtctcccaggctgaagtgcagtggcacgatcattgctcactgcagcctcgacctgctgggctctggcaaacctcctgcatcagcctctcaagttgctgggactataggcacacaccatcatgcccagataattttaaaaaaatattttttggtagagatagggtctccctaggttgctcaggctggtcttgaactcctgggctcaagcgatcctcctgctttgggctcccaaagcactgggattacaggcgtgagctaccacatctggccaggaagtttcaaatctaaacctaacgatcttgtccaggagactcagaaagtcttcccaggagaccccgggagtccttggactccctgactactgctgcagcagagctggtgtggaacgaggggggcacagcaccaggagacaggggtgcagggtagccagcatgaccgtacagtcaccacgcagaaccaagctcacaggagcaaagcgacagcccgccacaaaggcaccactgctcaccgtcacgctctggtagcccttctgacaggccaggtggagcggagtggctccatggtagtctgtggcatttaccatggcgcccttggaaaccaggaggtcgatgagggatgcctgccctgcagagcagaaggacgtcacgatggagaaggaaggcgcagaggccttccacaccttaactgtaaaaccacaacactattgcaccctcctagtcctgggcatgaaacccacggtagatactttttctgctagagaggaactacagctaatataaagtaaggctccgcagactccagacatgttggggtgggccttggaggggacccagcaaaagtccacctctcagcaataaacaataatggaaaagagacttagacttccacaggctccatgactcatcagttcataagatggagtattatgcagccattaaaaaatactgacaagtaaacatattcttgcatagtgctaggagaaaaatagcacacaacagaatattatgagccctagagcaccacacactttatgcgtccacacatccacacaagcatgcagacaccccagacactcatcaatcacaacgatctctgggagacagggatggccggggactctggaggaccttatgttttctatcttgaatgtgcactttattttatttatttatttatttatttatttatttatttatttatttatttattttttgagacagagtctcactcagccacccaggctggagtgcggtggtgctatctcagctcactacaacctccaccttctaggttcaagcaattcttctgactcagcctcccaagaagctgggattataggcgtgaccaccacaacaggctcatttttgtatgttttgtagagacagagtttctccatgtcggccaggttggtctcaaatgtctgacctcaagtgatttgcctgcctcggcctcccaaagtgctgggattacaggcatgagccaccatgcccagccaaatgtatactttaaaagacaataataatatttttttaaaggcagggccacaagaactgcgagctgacgattctgagaccgttctcatagttcagattcaagccttcccttgctgggcccccagcctgcgggagcgttaggcagtgtttccatgccgtgggacccacgcaggggggctcagccagcgcaggaggcagcagggtggccgtcgaggcctgtggaacgtttgctcctcttctccttccggcccttggagggtggacccacgatgcagccccaactgccaacccccacccagcccatcagccaggcctctctgctgggtcaccttgggcaccatccctttgctgtgacagcccctaggggccagcccaggaccacataccacagacagcagccacatggagaggggtgtgccccctgtcgtctctggagaatggagtgacaactgagggatcattcaacctcctaaaatacagaaagagatagaaaactacacaggggaatggcacagcaaagcctctccctgaccaggtagataggcaggtaccacagacagaaggcggctcacaggatgccacccaagagatgtgtgtctccggcactgtcccagtgctcacccagcatgaggaacagaggcacctggccctggagtctctcccccaccaaccctttaggcctccacacccagcaaaatagcctgacaaggataatgggaaaccaaaaatgttactgggaaaaactgacattcctcccatcctaaaaccccctttctgaggctggggcaggccctataaccagcctaccctggcagccagcccgccagtgagcaagtgctttgacaacctctaacctatctgattctccaaaggggcagctgttatcatctccactgtacagcagaggcagctggggggcagggaggacagtccttatctgcagtcacacagcgcacagtggagaaggtccaggaggcctgtctcctgcttcctggcactctgagcctccaccagcaccctcttacccagagacgagtttctcacagtcatcgcagaagcagagagggtgacacatcttttggacggtatctttatcatggtcctcttggctcagaagtctctccacttctttctggttacctgatgcaatgtgctgaaaagtgacatccaagatgctatccacatgctggaattactcaattattaggagtaaattttttgagagtcctttttggtttttttgagatggagtctcgtcctgtcgcccaggctggagtgcaatggtgtgatctcagctcactgcaacctctgcctcccgggttcaagccattctcctgcctcagcctcccaagtagctgggattagaggcatctgccaccacacctggctaatttttatatttttagtagacacggggttttgccatgttggccaggctggtctcaaactcctgaccacaagtgatccacccatctcggcctcccgaagtgttgggattacaggcgtgagccaccaaacctggccgagagtccttttagaaatgctcatctatgtgtttatggatgaaatgatttgcactctggcatttcctttgtaatcatcttggtggtagggaaagtaggtgaggagagatgaaacaactgcacaatggtggccggctcattctactactctatttctggaaatgttaaaagtttcccataattaaaaaaacaatgacatgcctggagcggtggctcacgcctataatcccagcactttgggaggccaaggcaggtggctcatttgaggtcaggagttcgagactagcctggccaacatggtaaaaccttgtctctactaaaaatacaaaacttagccggatgtggtggcagacgcctgtaatcccagcgactcgggaggctgaggcaggagaatcacttgaacccgggagatggaggttgcagtgaaccaagatcgcaccattacactccagcctgggtgacagagtgagactctgtcacaaaaaataaaaacaaacaaacaaaaaaacaacatgacaaaatccataaagcaataggaatggcgggcagacaacacatctctgaacatcagtgtggattttgccacctcactagaaaaagcctcagccctgttcctcttgtgttctttttttttttttttttttttttcagtgaatccctacagggtgacaaataacagaatttatttatttatttttttagaaacaaggtcttgctatgttgcccaggctggagtagagtggcacaatcagagctcactgcagcctcaacctctcgggctcaagtgatcctcccaccttagcctcccatatagctgggactacaagtgcacaccaccatgcccagcttcatcttgttatttttttatttattattatttttatacttgctatggactaggggatcctcttttattctaatagagcatcagcctgtaaaggaaagagaatagctgcaatgagcaggaaaccccatcaacacacaaacctgcagagctcacctggtgcttcctggacgtgctcattccccaggacccactctggctccaggtcgcctggaagcacagcagcctcccccagggggctctgccctcgcccagcactcacggactgccctgcgggcacctcagcggcctgcctgtggccagtgtctgagcagggagctgcccccatgtgccaggtgaccagaccaccaggaagtcaggcaccgtgttcccaacccagtgcacacgcccataaacatctgacaacgggctcctcgagcccagcggaggcatcagctctgccagggctgccagcggaggcaccactgagctggcctggaggaattagtagtattgcgaggaactgagaaagcaagaggcctggcctgcgcccacagtgtgccgcccagcacagctacagcacagcacgctgggggaggtggggaaacatgccgctctcactctgccacctaggctggagtgcaacggcacaatcatagctcacggcagcctccaactcctggcctcaactgatccttccacctcagcctcctgagcagctaggactacaggtgcccgccaccacacctggctaatttttgtattgttttgtagagacgggtactcatgatgttacccaggctggtctcgggcttctggcctcaagtgatcctcccacttcggcctcccaaagtgctgggattacagaagtaagccaccccacctggccttgatcccaaatttaaaacctcagcattcctactgcccattctgagcacagaatggaacttcagggtttatgcagaccaccaccctgatcattttttttttctttttgagacagagtctctctgtcgcccaggctagagtgcaatggcatgatctcggctcactgcaacctccaccttctgggttcgaacgattctcctgcctcagcctcccgaatagtgagactacaggcatgtgtcaccacacccagctaatttttgtatttttagtagaggcggctgttgcaccatgttggccacacttggccttgaactcctggcctcaggttatcacccacctcggcctcccaaagtgctgtgattataggcatgagccaccatgcctggccaaccctgatggattttatagaggcaccaagagatgcagtgttcctcacccacatttacccacagagatgtcttggtatctcaccttaaacaggcagtcggtgggagacgaagtcatctgagagagtaagctcattctctgcttaaggaacagcctgtctccaaatccctcagactcctgcagggaaaaaaccaaacacaccacgagatgtcagtgcagatccttcaaaacccagcacctcagcaacaaccccggctgtctcttcagagcagtatcggctgcgcctctctcccgtctcatatgggacctgctcactgagacggaggacgggctgacgtcaggtggggagaaggcttcctggaagtggaggctttgacggttgctccctgtgggggatggggatggtggcggcaccctgactgcgtgtatatgtggaatgtgccatctccagcgtggaatgcggcgcacacacaccattgtcctccagatggaaactcacattgccgtggcctcccttcctcctcaagcctctgaccaaatgcctgcagagcccaattccctgctgtcttatctgaggcctttgggcaggaaagccatttcacaagctggtctcaatttcccactgtcaaccagcaggagagagaggggtcttgctttttggacgtgcctattaaataatatggccacatggccaggcgcagtggctcacacctataatcccagcactttgggaggctgaggtgaacggatcacctgaggtcaggagttcaatacgagcctggccaacatggtgaaaccaatctctattaaaaacacaaaaaattagcagggcatggtggtacatgcctgtagtcccagttacttgggaggctgaggcagaagaatcacttaaacctgggaggcagaggttacagtgagctgagatcacaccactgcactctagcctgggtgagagagcgagactccatctcaaaaataaataaataggccaggcgcggtggctcatgcctgtaaccccagcactttgaggggccgaggcgcgtggatcacttgaggtcaggagtttgagaccagcctggccaacatggtgaaacccctctctactaaaaatacaaaaattagccgggtgtggtggcgggcgcctgtaatcccaactactcaggaggctgaggcaggagaatcacttgaaccccgcaagtggaggttgcggtgagccaagatggtgccactacactccagcctgggtgacagagcaagactccatctcaaaaaaaaaaaaaaaaaaaaaggcaaaactctagatactttccataatactttatgaaatcatttctcgcaagacagttcaatgcttccttgagcacctgcaaccaaaccatgtaatgacaaattcgcttcctgaaaagggtcttggtgggaagtcaagggaattttctccagccagcggctgccagaaaacccccaaaccctgacaaatttgtggaataaggatgtctctttacagccctctaagttttgacttggaggtccacctaaagatagagctgacagcatctctggggataggccattcctggggtcctctgccatgcagggtcctcccagcagtcccccaggagggttaacttagcaaatgaacagcagcacctgtgagaggcacttctgcccccagctgctgtgtgccatataaagctctaacaatccactttacaccgcaattcacagctgaggagcttagggtcagagaaacatcacacattgttatccgggtaaatccagcactctttccgcaactctggttaacgatttagacagcagtgatgaagacaggtaggtctcccaagactgaatcttcagggaagaatgagctattggaagagagggggtatcagcaaggacttactaaagaaatgggtaaatcctttctatgagaaacccagtaacgtaaggaaggccagaagcatgcaaagctgcagacaagaatggtacaggttctttcttgtttttttatctgtttttttttttttttttttgagacggggtcttgctctgtctcccaagctggactgcagtggtataatcatagctcactacagccttgaactaccaggttcaagtgatcctcccaccttagcttcccaagtagctgggactaaaggtgtgccaccgtgcaccgctaattttttgtaaagatggcggtctcgctacattgcccaggctggtctcgaactcctggcctcaggtgatcctcctgcctcagcctcccaaagtgctgggattacaggcatgagtgaccaggcccaacccagattctttcaaagttctctctttttttcattcacaaaggtaactctagagtcatcccagtaatttattttcagaaagctgaagtcttcatttatgaacatgcttaaagaatgttgagcaggtgtggtggctcatgcctgtaatcccagcactttgggaagctgaggtgggaggatcacatgagcccaggagttcaagctcagcctgggcaaaatagcgagacctcatctctacaaaaaatttaagaattaaaaaattagccaggtgtggtggcacacacctgtagtcccagccacccaggaggctgaggcaggaggatccctttgagcgcaggagttggaggctgcagtgagctaggatcacaccactgcactccaccctgggtgacagagcgagatcctgtctctaagaaaaataaaagcttatggtcatctcaagtatattttgcagagaaaatttccatgaaactatattatataaaatcaatagtaaaatctaactggatgtcctcatatttagtccttaatacttttcagaaacctcttctgctgtgaggagatacacttgggatttttccctaggaaacaccatcaatacatagcaatgactctctacattcctaaagggaacttcattacttaaaccagtgagcagctaagacagaggccatgatacagacagaatcacaacaacaaggaagccacgacgcctgctccgtcaattacaggccacagtaaatatacgagcatctctcaatacctgcagggtgggcttcacagccagccgtgaggatgatgcatacctgtctcaaggtttcaccagaaccaaccatactccatccaggagggcagaaccagggtccaacaccctgacaacaagaggggtgccttgggctgtgaccctccctttcccatccaaactaaacactatccttaggggcatccttacaccccagatgcagagacaaacagacatgcccaagacatctgagcctataggagtggactcaggctgggcgcagtggctggtacctgtaatcccagcactttgggaggctgaggcaggcggatcacttgaggtcaagggttcaagacgagcccagccaacatggcaaaatcctatctccacaaaaatacaaaaattagccgtgcgtagtggtgcgtgcctgtagtcccaggtacttgggaggctgaggcaggagaatcgcttgaacccgggaggtggaggttgcattgagctgagattgcaccactgcactcccgtctgggtgacagagcgagactcagtctcaaaaaaaaagaaagactggactcaaaccctcaaaccaacaccagcacgagagaaggaacctctcaaatattactgccaatgtgcctgcaatattttctgaaataaaaggaggtgtgagaagccgatgtatactgtttggtcagccacctccttacaacctggtgaaggcctccacagaaaatgagaaagcagaagacagccacgctacagggagcagcaaggggatgggagcatctttgagaggtggacacctccttccaggtgaccagagacaccctgggcccagcaaggcacagcagagtgattcctctgcagggcaggaaagccggccagggagtgaactctcagaccaatctgtttcttgccctgcaagaaccagagggcagggcaaaaaccaccgcaggcacggtgagagaaacacaagttcccacagcctcatagaaaacaagtcaaactcacaactcttactccccagccttggaaatgaacagaaattctgatctgcacacacgcataggtagagacacaagagcacacacacacgcattcttttttatttatttatttatttgtagagacaaggtctcactatgttgcccacactggtctccaactcctggcctcgggtgatccacccgcctcagcctcccagagtgctgggattataggcatgagccactgcacccagcccacatacatactctagaatcttgctgatttccccctaaatatggaaacaaggcagaagaaagaaacttttcagaagagccacagccagccacatccgagatgcgatggatgacccccaatttcactggcagctgagtggggtgattaaatcagacttcagagaagagcagagattaattcttcaacaagtacctgaatactgtcaacgagtacagcgagatcatgatctaaaattttggttaaaaagataactgtgttcattccttgttaccgccaagtcacgtggaggcagaggctcaggtgtgttcaagattcagctgcgtccgtgacccaccgccatagccaaggaaggcattgtactgctacacctgtgacccactgccatggctgaggaaggtcttgcactgctgcacccatgacccacaaccgtggctgaggaagacattgcactgctgcacccgtgacccactgccatggccgaggaagacactgctgctggcggtgtaatggatgttaacactgatttacaaggggtgctgaaggacgccttcatccacggtggcctagcacatggaattcgccaagctgccaaagcctcagacgactgctgagcccatcttggtgtgcctgcatccaactgtgataagcctgcatgtgccacattagggagaccctaggtgctgaacaccaggtcaaactaattaagattgatgacaatgagaaacgaaaggaatgggtaaggcctctgtaaaacgacagagaggggagaccctatgaaggggctagctgcagctatgtagcagttaaggactttggcaaagaatctcgggccaaggatgtgattgaggagtgcttcacatgcaagaaatgaacgaataaaatgctggctcacatgcctcaaaaaaaaaaaaaaagatacaattgtgtatgcacagaaaaaaagacaaatgctaaaatattaataagtgtcacccctggctagtaagtttatgggaagtttttgttgtcttcactgccattttatagactgcaaatattatttgtaagcaaatattagtcttctaattaggaaaaaattaagctattcttttgggaaaaaaacagttctctctctctctctatatatatatatatattttttatatatatatacacatatttgagacagagtcttgctgtgttgctcagactagagtgcagtggtgtaacctcagctcactgcaacctctgcctcccggattaatgcaattctcctgcctcagcctcccaagtagctgggattacaggcacctgccaccacacccagctaattcttgtatttttagtagagacagggtttcaccatgttggccaggctggtctcgaactcctgacctcagatgatccacctgccttggcttcccaaagtgctgggattacaggcgtgagccaccgtgcccggcccagcacacaatataatttcaattatgtaaaatatacatgggtaggaaaaagactgaaaatgcatgaacgtgtcaataacgaatgaatggggtggaaatgcctgcacctgagagcacctggacaggctgatgctgtctcccagacgctttagctcatcattattttgggagattctacatcaaagtctgacaaagatgaatgttcaatccttggcactctcaccttataatacagagatcttttcattttatagatttcaactttgtgatttctgtatgatcacattttactcattggtatgtagtaaaacaggccagcaggacaaccatggttcaagattctcacgattcacatagaaatataatcacatcccctcgccgaccccagccaatgctcaataaaaaccaaggaaacaatggcaaggccactgagtcctcaaattgcacacattaatggtctcacagatggcagtggcagcccatcgggagtggctgctgcaaagacgtaagctgcagtggaggaagcgcggccaggtttgtgcactctgcagggccaacaggagccaggaacaggcaggagcccccatctcctactgagctggcagggcgggagccctgcactcccaggcgcagctgcagccgcccagccgcagctctggatccaggaatctctgcactctcaggggcccaggaagcatccctgccgccgcaggctcgtaagtgcctgctcccgctcctccccactcctggcaccgacttcaatttcagagcaaagctgaggccaagcccgggtactgttgcaacccagccatgtgtgcacatgcttggtgtgacactgacacaccagcctcctgatgcctcagacccctccaagattttgggcgctgatgagcatgggagagtagtcaaggtaggggctgagggcagctcagtgcaggcctgcagatgccccttggcacaaacagcctggatgcactggccagcatgttgatggtggcagaaggcagacacgcttctgggtggaaaggtgcaggtgcccagtgaagccccaccttcaagacagggacagcctaaagcctgggggccgggctgtcagtcccaagtggagtccacgacccagactgagaactcatggtgctttctccaggcccacctatggaccaatcagcacatactccctcccttctgagccataaaaaaccccggactcagccagactcagacagatgtcgggactaccaactgcaggaaggagctacctacgtcaggcctctttaactcgtcaggacgacctgcctgtggaaagaagctgcccactgtgggtctcctgagagctattctgccgttcagtaaagctcctctctgccttgctcaccctccactagtctacgtacctcattcttcctcgacatgggacaagaactcgggacccaccaaatggcaggactgaaagagctgtaacataaagagagctaaaacatgctcccgactcactacattgcaggtgacgagaggagagaagagctctggcccttcagggagcccaacctaggagttccccgagccagggctatgacaccctctttggggctctgcagttcctggtgtctccaagcttccaggccccactgtgttccccagtgcccaccgtggaagcggcctacagtacgcctgctctagctgcagccttgcatggagcaggaccctgtacaagcaacttggagctgcccaccccacctcagtcggcacacctggttgtgtgcagtggccagaccctgcacttgctcacatacccctcgccactccacacctggctcgcccttggcaggcatgggatccaggccagtagcacaagccgagcgcagcctgccaggccaagagcgtgaaatgagcccagcaggcccgaacaaaactcaggcaaaggagccaccagccacagaggtttccggctggaaaagcgacagtccagggatcccgtgacatcacttcttgactatcaaggtcaagaaatccaaattccctacttctggcttccctttgcacccacatgtctttggagaggatggggactaatgaagtaggatattaacaatgtaaatcccaatgataacccaccaatttttaccaccaattgagggcttggtgttctcttcactgagtgatttttaagactcacagccctcaaacagctgaggccccattcctgggaggcaatttaagaatccgtctgcccacataccaaccccagcaccctatcaagggaaccatgatgcccacaaaggaaggccagggcaggggtgagatcttacagggggtttagcagagaggcttccttgccgaatatattcaatggcagcttcgaatgaggtcaggcagtatcccagttcatcctttgccaagctgctaaacctgaagtttttgatgtaactcaaatttgccatcctaatgaaaggaagaaaaaagttatgttgttgtctatccaagtcacacttctgcaaaaaaaatatcattggcttgggcaactgatcaaatatctagtcagttggttcgctcaggaagctacgaccaccatcccctggatctctctgcagagtgtgtgcgattaggaacacaagtaaaatgactagctagttccctgaaatagtctttagcaagctgattaccgtaaactgagctgtgggttccaggggagagattatgggttttggggccagaaagaatggcaatcagctttctgctcaaccactgtctagacactcattccagaacaagaaatgtaagctctccgggccttggtttccccatctgtaagtggatggatgaagcaaggggaggccccacacctagctcgtaacaggtgtccaattgaagatgggcttttcctagagttacattagaactaccacagtgcagtgctgccattttttttttttgagacggagtctcgctatgtcgcccaggctggagtgcggtggcgcgatttcagctcactgcaagctccgcctcctgggttcacgccattctcctgcctcagcctcctgagtagctgggactacaggtgcccaccaccatgcccagctaatttttttgtattttttagtagagacggggtttcaccgtgttagccaggatggtctcgatctcctgacctcgtgatccgcccgccttggcctcccaaagtgctgggattacaggcgtgagccaccgtgcccggccaagcactgccattttcaaaagagtatcttaaaagaaaatgttaccaattagggatctccgttttcacaagcaagtataacaggactgatagcagatcatcagcacacatggtctccaggttcactgcaaaggggaaacacacattcaatgccatcatgagattcaaatggactgacaagcatatcaactccctaccaccgcacaccttgtgaaaccacgtatcagggagatcatacactgggggagaaatgtcattgcacaagctcctttacagcgtcctgatcagatgtcaggtccagggggaaaagaatgcccagcaatttcagaacatgaccaaaacaaggtattagtaactctagccagatacggcagcacgtgcctgtaatcccagtgctttgggaggccgagacgggagaattgcttgaggccaggagtctgaggccagcctgggcaatatagcaagacccccacctctacaaaaaaatatgaaaattagccaagggtggtggtgcatgcctgtaatcccaggtacttgggaggctgaggcaagaggatcacttgagcccaggagttcaaggatgtagtgatctacaaatgcacccagcctgggtgacagagtgagaccctgtctcttttttttgtttgtttgtttttgaaacggagtctcgctcagtcacccagactggagtgcagtggcgcaatcttggctcactgcaagctccgcctcccgggttcacgccactctcctgcctcagcctcctgagcagctgggactacaggtgcccgccaccatgcccagctaatttttttttgcatttttagtagagacagggtttcaccgtgctagccaggatggtctcgatctcctgacctcgtgatctgcccgcctcagcctcccaaagtgctgggattacaggtgtgagccaccgcgcccagccgaccctgtctcttaagaaaaaaaaaaaatatgttaactccaagcagaccatgccttgccacccccttggacgctgaaagagcccagggaggtggcttcagtgataaaaaatgaagatgagcccagagccatcacctaaagtctctttcttcctaaagtcaccaaggtccttcctaaggtcacttccattttatagacatggagtccactgcccatgtggagtttcactttttttccattttgaaattttaagtaattcattcacatttaaaaattcaaacaatacaaaagagcaaactgtgaatgttcctcccatccctgccagccagtctcttttcccagaggctcctgctgttgcttcctgcacatctgtccaggacagctatgagctcaccatcatatcgtggctaaacagctatcccccattctttgatgctgttggctggaagtctaccatatgcattcctgtttatttcattccatacactcaggatcatcccttatctacacatacagctatgtctcttccttactgactttttcttgacttgttttcttttacttcttcttttttttttttttttttgagaaggggtctcactctatcacccaggctgtagtgcactggtgtgatcatagctcactgcaacctccaattcctggcctcaagtgatcctcccaccttggcctcccaaagcactggggttacagaggtgagccactgcacccagccccataaaaatcccttaagacagcatcactctttgctttttcatctggatgtagcatctaccccttggccagtcccctttccaagcacaaacctctctggcttggagactgtgtaatgagctgcaccacttttcgcaagcagacaagcttctgctgtggggaggtgcatttgttcagctgagccagctctcttttggcacgaggtatgttaaagctgtaaaataatttggaaagtgacaacttcagagcacagtaagagaaccctctggcctggatctaagaacacatctcaggatctacacttctcacaacaaaccagaaggaatgaaacacaaaaacagatactgagaagtcatctgactcaagtcagcggcaaaacagaagagccttcaatcccattcaggctgccaggtgatagagttgtacaagaaaagctgaaaaaaaaaaatcctattcctagagggaaacaacccaaagagggttgtggtaggtgaaacatttttgtgtcctaatgaaacttaaattaggctcggcgcagtggctcacgcctgtaatcccagcacttgtaaaccagggtgggcagatcacttgaggtcaggagttcaagaccagcctggccaacatggtgaaaccccatctcttctaaaaatacaaaaattagcagggcatggtagtgtgcacctgtaatcccgctactcgggaggctgaggcaggagaatcacttgaactcaggaggcagaggttgcagtgagccgagatcacaccactgcactccagcctgggcgacagagtgagactttgtctcaaaaagaataaaaattaaagaaatgaattaactcctaagtaggtatctctatggcaaggttcccttgggtgggcaggtgggatgtcccctgcacgcagaacccacatgggcaaattacatgcccacttggggaccagctgcacaaaaccccgtgcccagcggctcccatccagctggcgtgctggtgcagtgtgggagggggacggccacacacagtcacctataaagggcagccctttatctttggttgcaagtaactgcgctgctcctcagaactaaccacatcaaaccagcgtgtcacctctgccaccgagagggcctgcttccgggagaagacagcacccctgcctctgaggacaccaagccgctgtggcgcaaacccttacctgaactccggtttcacaccaatatctttctgctgaagatcttgaaggcttcttgtgattttgttaaaggccgcatcctaacaacagattttaacgaaccttcaaatttctcaaaaagcacagaagaaggcttccatcttgggtgataataactgagaacctacctcacttgcctccatggtccccacgtatttaaagatcaggttgtaaatttcatgatggacgtatatctgtggaatcaacagaccccattcagggtgtgagcgggcaacagggtgtgcctcccagccactccgccccaccctcacctccactgcctgcttcatcaggttcatctgggcctcctgcttggcgagcattttctagagggcaagaaaagcacagtgaaagggcttggatttgcatgggggtgcaccacaattctccctctcagaagtcctgctgcttaccaggtgagagtccctcagaagctgctggaggcatttggtgtagagagcattcgctgagtcctaaaccacatagagcagagggacaggccacccttaccagcaaggccatgacgggggagccggagcgggtaaggcgcacagagcttcaagtgctaacacaagctttatgaagtcaattacgtgatttttctcaactttttttttaggtgtatatgcattaaaagcaggagaaacttccccttggggttaacacagaggataataatactcattgttatacttccccatgactttaccacttggtttgttttttctttttaagagacagggtctcactttgttgcccagagtagagtgcagtggtatgactatagcacgctgcagtctcaaactcctgggctaaagccatcctcccacctcggcctcccaagtagctgggaatacacgtgcatgccaccatgcctggctaatttttgtattttctgtaatgatggggtctttttatgttacccaggctggtcttgaactcccagcctcaagagatcctcccatctcggcctcccaaagtgctgggaagacaggcttgtaccaccatgcccggttaaactacttttatagttagagagaaacatttttaaaagacttcaaacagtgaggcagcaccaggcagttccagaggaaactgagggctcccagcaccctgcactgaaccgagacagggcacgccaggcagaggacagcacggctactgactatgtggtgacggaggctctttctctcgcattctcggaatgttcgatggaaagaggcgatgttcctgtcaaatcgctcggagtgtcttcccaagaactctctcacatcttcaatggttttcagggaaaagggatctgagggtgccaaaggctcttctgaaaaagaaacaaacaggtcaggccggctgaagcctctgctggttcctgactctgtcctatcctacagggcctaggccctctggggaggagggcaaatgtccttatttcaagacactacacaagaacagcccagttacaggacaccctggagtccagagagcctggtcctctcaaggcctcttcctgggacaaaaccaaactatctgggaccatgggcaagaccccaattcctgacaataagagcatcagtgtgcatccagcacattattatctcaattttctggggcaaatgaagacttattatttattaaaaataacgaaatctcaaagaggcacaatgctggggctgggcgctataagagacagccctgaagctgacacccagagacaaagctggggctactgctttgcataactcatgggggcaacagtcacatcccaggctgatcacaggtaggctgtctatgcgaatgctgcctcctggaattgtgcaatgcccgacctgtgcaacagcagccccgatccacacctccttagcccagtgactttaaagttctagtaggaaccactgaaaacaattatataggtctccatgtggctcttgaatattttccatgatgtttaaccttttttaaaaaaataatttattggccgggcgcagcggctcatgcctgtaatcccagcactttgggaggctgaggcgggcagatcatgaggtcaagggatcaagaccatcctggccaacatggtgaaaccctgtctctactaaaaataaaaaaattagctgggtgtggtggcgggcgcctgtaatccccgctactcaggaggctgagacaggagaatcgcttgaacccgggagctggaggctgcagtgagccaagattgcgccactgcactccagcctggcaacagagcaagactccatctcaaaaataattaaataataataataataatttattttattgtttttggagatagggtcttgttctgtagcccatgctagagtgcagtggtgtgatcatggctcagtgcagccttgaattcctaggctcaagtgaccctcccacctcagcctcttgagtaactgagactacaggcatgcaccaccatgcccggctaattattttatttttttactttttatttttatttttatcttttttttgaggcgtagtcttactctgtagcccaggctggagtgcagtggtgcgatctcggctcaccacagtctctgcctcccgggttcaagtgattctcctgcctcagcctcctgagtagctgggattacaggcacgcaccactgcacgtggctaattttttttgtatttttagtagagatggggtttccccatgttggtcacgctggtcttgaactcctgacctcaggtaatccgcccacctcggcctcccaaagtgctaggattacaagcgtgagccaccacgcccagcctactttttatttttgagacagagtctcactctgtcacccaggatcgagtacagaggcgtgatctcagcttactgcaacctccactttctgggttcaagcaattctcctacctcagcctcccgagtagctgggattacaggtgcatgccaccacacctagctaatttttgtatttttagtagagatggggtttcaccacattggccaggctgatcttgaactcctgacctcaagtaatctgcctgcctcagcctcccaaagtgctgggattacaggcgtgagccactgcgcccggcttgatttttttaatttttttatagagacagggtctcactatgtttccaggctagttttgaactcctggcctcaagtgatccttgtgcctcggcctcccaaagtgcagggattacaggcgcgagccaccatacccggccttgtttaacctttcaacagctaagtcaggaacaagttcaacaaacacatttttctaaaacaggagaaaaaggttttttctcccagaatacctgaactctctctcttttccaaaggatgggctatacacaggatgctgaaactctcttctttttcattgtagaaagtttcttcaaagagaatgggcactgagagaagacaggcaaaaccagctcctaatttaatcctgttcccttgaataaagacatcctggaaacaagaaagccatcactgcaccagcagccggggcaaccacatcccactctcagcctggcccccgatgcagcacttaaccagaccctacggccttcaccccattgtgggtttgctggggcacaaatactctcctgttttgctcattttgatactaaaatgtttcctctttgttggcctagtagctatggctgcaagatacctgaatcatttctattttcttttgagacagagtcttactccatcacccaggctggagtgcagtggtgcgacctcggctcactgcaacctccgcctcccagggtcaagcaattctcctgactcagcctcctgagtacgtggcactacaggcacccaccaccacacccagctaatttttgtatttttagtagagacacagttttgtcatgttggccaggctgctcttgaactcccagcctcaggtgatccgcccgccttggcctcctggagtgctgggattacaggcgtgagccaccacacctggcccacacgatgcatttgttcatcttttcagtttcctttatttggaacagtgcctcggtctttctttgcctttcacgacattgacatttttgttgcgtatcgcagactctccctccgtgtgtttgggagggtttgtctgatgtttcctgacaattagattacggttttacagttacacgtttctgataggaatgccctgaaagggatgttttatctccctctgtgtatcctgttggaaggcacatgatgtcagcttttttcactgttgatgttaaccatggggtatgtgtcgttttgttttgttttgcttttaaagcggaagcaggtaggttctgagagggggagattttattcccattcaggaatggccctgtttttcccggcatccccatagtcagggaagcccggccacagtgtcctcactggggcaggggctgtgttcagatgcggcagctgaggtttgtggcgctgtgacagggagaggaagcacggggttgtcagtgcatctgctctgccctgtggctcacaagacacactgctgttttcctgctagagatctgctcaccccagctgtcagtcagcttagttgatttgttctcttttggacacctagatctacaaaaaggacaggagtcgggctttgcgcagctggtctgcccccagcacccggccatgaccacagtaagccatgcagggagtagcaggtgggattcagccctggccacactgcagcacaagattacttccatctcttagatagggagagctttcttaccttttcttttcacaaagaacacagaatttcttctcctaaagaaacagctcaatgttttttctgttgcaacatttaaaaaggatccaggccgggtgcagtggctcatgcctgtaatccaagcactttcggagaccaaggtgggtggatcatttgaggtcaggagtttgagaccagcctggctaatatggtgaaaccccgtctctattaaaaatacaaaaattatccgggcatggtggcgagtgcttgcagtcccagacactcaggaggctgaggcaggagaatcacttgaacctgggaggcgcaggttgcagtgagctgagatcaagctactgcactccagcctgggtgacagagtgagactccgcctcaaaagaaaaaaaaaatgtagtgtgtgattctagagctaagaagaagttttttttgctatgaaagatataattggtataatcagcacagtctgtatgaggacaatatgttggaggacattctatcaatgctaaattatctgagtgtgatcattgcgttgtggttacataagagaatgcctgttcttgggaaatacacactgagctgtcttgggctaaagggcacagtgcctgcaacttactctcaaaagattcaggccaggcgcggtggcgcacgcctgtaatcccagcactttgggaggccgaggcgggtggatcatgaggtgaggagatcgagaccatactggctaacatggtgaaacctcgtctctactaaaaatacaaaaaattagctgggcatggtggcgggtgcccgtagtcccagctactcgggaggctgaggcaggagaatggcgtgaacctgggaggcggagctcgcagtgagctgtgatagcgccactgcactccagcctggtgacagagcaagattccatctcaaaaaaaaaaaaaaagattcaaaataataataatatgtgttgagagacagcgataaaaccaatgtggcaagaatgttaacagcttggggggaagcacatttaagagttttttcaactttactaaaacatttgaaattatttcaaaacaaaaagattgttttttgggtttgttttttttttttttttgagacagggtctcactctgttgcccaggctacagtgtggtgacacaatcatggcttactgcaagctcaaactcctcagcttaagcaattctcccacctgtgccttccaagtagctaggactagaagcacgcaccatcacgcctggctaatttttttatttttatttttggcagagatggggtctcgttatgttttccaggctggtctcaaactcctggcctcaagtgattctcctgcctcggccccccaaagtgctagaattataggcgtaggccaccatgtccagctgaaacaaaaagcttttaaaaactaaaatattcatccctgatgtcctattcgggaccaagacactgacaagcttttcacggcactgggataaaacaacttcctttggctcggacatcagcaaggaggaggtgttccagcgacacacggcagaaaccccatcacgggatcagagagagatgcttggcacctcccggcctccaagacagcagctggggtccagcttaccatcactacctccctttcctccaccacaaaggcagggtccctccagccccccacggggctgcagtgtgtgtcaaatgccaccattgccagtagctgtgaaaggctgagaacgggactctcttcctcccctctggccccaaacaccgagtaggtgaccctggctgatccaccaagaaatgaatacctttccatttaaggtctgaaaatgctcttccacaggtatcaaaatgtaggactcaaactgacaagtagactggatgctgctcgacaggcttcctttgcagggtactaagacctggaaaaaacaattcggggcaacattagacagacgtgccatttaccacctcagcagaacaaggtgtccccaaaggcgctccagctggacacacagcgggacctgctggcagagagaacgcccgaggtcccttgccaacacggccacagtggctgccagctgaggtgatctgctgctgctgttgttgttgttgttgctgttgtgatggaatcagcctcaccccaccacaggcagagggaggaggcgaacagtacaaatccttctccaccttcagatgtggaggctgacggctccttcctacaatcgctgggtcccccccaggctagtggccccaggctccctctctattcttaacagcacagttataaggacccaggggctcagggacaagcccagatgaagagaggagcatttggaaagtacagaaaagggaagctaaaaaatcacactttctcccaccattcaaaaaagaaacatggccaggcgtggtggctcatgcctataatcgtagcactttgagaggccaaggcaggcggatcacttgaggtcaggagtttgagaccagcctggccaacatggcaaaaccctggctctactaaaaatacaaaaattagccgggggtggtggcgcacgcctgtaatgccagcactttgggaggctgaggcaggcagatcacttgaggtcagcagtttgagaccagcctggtcaacatggtgaaactctgtctctactaaaaacacaaaaattagccaggtatggtggcatgtgcctgtaatcccagctactcgggaggttgtgcttcagcccaggaggcagaggttgcagtgagttgagatcacatgattgcactactccagcctgggctgcagagcaagactctgtctttaaaaaaaaaaaaaaaaaaaagaacacttcacatggatgatggtttccttctattcttttctttacgcttttatttattttttttttttggagacagtgtcttgctctctcaccgaggctggagtgcagtggcgcaatcatagctcactgcaccctcaacctctgggctcaagccatcctcctgcctcagcctcgtaagtaactgggacaacaggtgcacacaaccatgaccagcattttttttttaagtagagatgagatctcactattttgtccaagctggtcttgaatccctggcctcaagcgatccttccaccttggcctcccaaagtgctgggatgacagtcatgagccactgtgcctggtccattgtattattctttgtttgaaattaaacataataatctgaaattttaataaaaaattaaaataaagggaggcccttagatgttaggctagaagaaatgacctcaaggctcccaagtggcctcaccactgcagttggcagacaaagaaagaagatcctagaggccaaagtgggccacaggcaatgggatctaaagagccagtcctcgggtatttaatgcttgaagtcagagatggccccccctccagctgcagcatgaaggactcacaccatcccattcaaggaagggccgtggctggagggccttcatgtggcctctgggaagcaggaacttctttttttttgagacagatctcgctctgttgcccaggctggagtgcagtggcgtgatctcggctcactgcaagttccgcctcccggattcacacgattctcctgcctcagtctcccaagtagctgggactacaggcgtccgccaccacacccggctaatttttttgtatttttagtagagacggggtttcaccgtgttcaccaggatggtctcgatctcctgaccttgtgatctgcccacctcagcctctcaaagtgctgcgattacaggtgtgagccaccacgcctggcctcgaagcaggaacttctaaggggcctcagagaactctgccccactgtgcccacatgctgcccgcttgtttgcatcaccttctccgcctccctgacttgcataatgcacgtctggccccattcactgcatccccactgtcaagcacactgctggacacgaggcaggtgcccagtgcatgtttactgggtaaatcgggggccctcaggaccaacccttcccccaactagttttctggcagacataaaaaggagctctagttcctcctatgccaagaaagagagaggcccctgctgcccagagcatttcatagcaaccagaagccaacgctgggctccctggctccacccaccatccccacagcaatcctgctgagaccggggaggagttgcctgggatagggggtagagagctaggccaacggcctccaggctatcccttagggggcttcagactacttctggagtagctgtggagtttttactgctggcaaagactttccagagttaccggcatagacgaagttcagagttactgcgttgaccagaaggtggggacccagaaatttcaaggcttaaccaaaaaatggtttattctagcccctttagaaagaattttttaaatcacagtaattaaagaaaggccatgtgtggtggctcacgcctgtaattccaacactttgggaggctgaggcaggtggatcacctgaggtcaggagtttgagaccagcctggccaatacggtgaaaccacgtctctactactaaaaatacaaaaattagccaggcgcggtggcaaccgcttgtaatcccagttattcaggtggctgaggccgggaggcagaggttgcagtgagccgagatcgcaccactgcattccagcctgggctacaagagcgaaactccatcccgggggtagggtgtggggttgggggaaagaaagtcctgcaggagctgcattttatgaggaaaaacaaaaggagacaggtgaggtggctcacgcctgtaatcacagcactttgggaggctgaggcgggtggatcacttgagtccaggagttcgagaccagcctgggcgacagggcaaaaccctgtctctacaaaaaatacaaaaattagccaggcgtggtggtgcacgcctgtagtcccagctacctaggagactaagacaggaggatcacttgagtccaggaggtggaggttgcagtgagccaagatcacgccactatactccagtgggagtgacagatcaagaccccatttcaaaagaaagaaagaagaaaagaaaagtcaaataaaaggcaagaatctgcctgagtggcacctactccagggcactctcctgcttcttccccaggctggattaagcactccacaactgcccacgctgccttctgtcctgatattcctctggcctgcaaatggcctgttctggaattccctgaaggcgtgccaagttccccattgatcgtgtaaccctgaaacctggcacggtgcctggcgtggagtggatggccacggcttgttggaagcatctatactaaataaattctgagaactggagcaggggtctcagcgcccttagctcggatgaaagttagttcctggggcttagaagacatgctgctaggctcccagactaggcccccggagcctacttaccccattaaatcagacaactcaataaaagaaccaagttcaatctcctttgaaatttttgtttttcctgtaggcaaaggggccagtctcctggtgcacctgggaaacctggaggactttcaactctgcactaaagccccagggacgcagacctgcccagcctgctctgaggacgccacaggtgtgtaattagccggatagttgtaagcacagaggtgacttttagaagcagtggggttgtcacaggcctctgaaattgaaatttgaaatctgggtgagcacaggagaaggcgcttccactgtccaatcagatagcagaggagggcaggaaggagacacctgcctggatgtgggggcatccccacaaaaggagcacctgcgaaggaaggcgcttcgaggcgtggcgtggcgggggcggggacggggtgggggtggggagggaaggagcagtcaagctgcaccctcagctgccccacacacactgctgcagggccacatggagatgaggcggcccagcagcgtgcacgcagggagaagcgtggtgcggttcactctgcgggagacacatggttttttttgtttgtttttgtttttttgagacagagtctcgttctgctgcccaggctggagtgcagtggcgtgatctcagctcactgcaacctccgcctcccgggttcacgcgattctcctgcctcagcctccccagtagctgggattataggcatctgccaccacgcacggctaattttttgtatttttagtagagatagggtttcactatgttggccagactggtctcaaactcctgacctagtgatccgcctgcctcggcctcccaaagtgctgggattacaggcgtgagccaccatgcctggccaagacatgtttttaagtgatttcacattttttggagcctgataaaggactctgatctccagggcagactcaagggcagtcaaacttggtacaaggttatgaccagcctgggcaacatagtgagaccccatctctaccaaaatattaaaaatgaaataaagttggtacaatgtccaaacttcatggaaagatatttggcattcaactgctgaggccacagggatcccttagaggtgacagaaaggatggcattttcctggagaccatcgagatattcgactttttctttcaatctatgaacataggtagagcacaactgcggactggacaggtgtgggtccatgtccctcctcacacggacaagagggggccggcatgggccagcaaacctgaccagtgtgacagtgacagcagctcctgcactctgctgatttctgctgagatgctggcctccctgattctttttttctttttttttagagatggtgtctcactatgttgcccaggctggagtgcagtggctatttagaggtgcaatcccactgctgatcagcacgggagggttttttgtttgttttgtttgtttgtttgtttgttttttgagatagagtcttgctctgtcacctgggctggagtgcagtggcgcaatctcagctcattgcaacctctgcctccaaggtacaatagattctcatgcctcagccatccaagcagctgggattacaggtacgcaccaccacacctggctaatttgtgtatttttagtagatatggggtttcaccatgttggccagtctggtcttgaactcctgacctcaaatgatccgcctgccttggcctcccaaagtgctgggattacaggcatgagccactgtgcctggcaaagcacaggagttttgacctgctctatttccagcatggcagtgttcacccctccttgggcaacatggtggtcccccattcctgggaggtcaccatattgatgccaaacttagtgtggagatgcaatcagcatagctcacgacatcccagagctcctgggctccagcgatcctcctgcctcagcctcctgagtagctgggactacaggcctgcaccaacatgcctggcaacctcactgattcaagtccaccaaacaaggctgaggaagacaagaggctcactgctgccccatgtggaccccagcagttccttgtggatgccttggatctcaggaggagctggactgagggtctggggttctgtggggcaaccctggatggcacagcctaagaagaatctccattctccggtgtccctgaaaggaaggtgacaaggcagaaaagttcattcaaaatcccccttttgctaaagtgggcttgagtgggatcccatgacttgtagctgaaaagcacttagttggccaggcatggtggctcatacctgtaatcccagcactttgggaggccaaggcaggaggatcgcctgaggtcaggagttcaaggccagcctgggcaagaaattgagaacgccgtctctacaaaaattacaaaagttaggccggacacagtggctcacgcctgtaattccagcactttgggaggccaaggcagatggatcacttgaggtcaggagttcgagaccagcctgctcaacatagtgaaaccccatctctactaaaaatacaaacatcagtcaggcatggtggtgggtgtctgtaatcccagctacttggtaggccgaagcaggagaatcgcttgaacccaggaggcagaggttgcagcaagcccagatagagccactatactccagcctgggcaacacagtgagactctgtttcaaaaaaaaaagaagaaaagaaagaaaagaaagaaaagaaagaaaagaaagaaagaaagaaagaaagaaagaaagaaagaaagaaagaaagaaaagaaaagaaaagaaaagaaaagaaaagaaaaagaaaagcctgaagtggcagctgccaggctcactaacaccatgctgagcaagatagagcttccccaaagagcttccacagaaataactatgccacagtgtgacagttctaaaaagctggataaagatatatatgaaaatatgcacttgtctagacagtagtttaaaatatcatacaacgaagacaggaagagaggaaatattcccgcagtacggccaggccctccctgatccatgcccaccttgcgtcccgtacttttcctctgcgacactcaccaccaccgtaattagtatgcactcgctcagtgaatgaccatctttcgcactagaatttaagctccatgagggtaaagatggtgatctagggccaggcgtgacagctcatgcctgtaatcccagcactttgggaggctgaagcaggaggatcacttgaggccaggagttcaagaacaacctgggcaacatagtgagaccccatctctacaaaaaataaaaaccagccaggtgtggtggcacatgcttgtagtcccagctacttgggaggctgaggcagaaggactgcttgagtctagaggtttgaggctgcagtgagccgtgttcatgtcactgtattctagcccaggctgggggacaaagcaagaccttatctcaaaaaaaaaaaaaaagagtgatgtgtgtttctgtttcttggtgaatcctcaccatcaagcaaagtatcttgtatacagcagcttttaataattgctgtgaaatgaagagatgacagtgaatgtctttggtgaattttatgagatttttatttggaaagagctatatattctaatttttaaaataatgaactttttggcttctaaaatctaaagtaagaagattgtggtgaagaaatatgaatcacaaaactaatcataaaaactggaaaagatgtcaagaaacccagcttctctttgggagatggaggtgggcggataacttgaggccaggagttcaagaccagctgggacaacacggtgaaaccctgtccctactaaaaatacaaaaattaggccaggtgtggtggctcacacctgtaattccagcacgctggggggccgaggcgggtggatcacgaggtcaggagatcgagaccatcctggccaacatggtgaaaccctgtctccactaaaaatacaaaaattagttgggtgtggtggcacacacctgtagtcccagctactcaggagactcaggcaggaaaatcgcttgaaccccggaggtggaggttgcagtgagtcgagattgcgccactgcactctagcctgggtgacagagcaaggctctgtctcaaaaaaaaaaaaaaaattagccaggcatggtggtttgtgcctgtaatcccggctactcaggaggccgaggcaaatcacttgaacccgggaggcagaggttgcagagagtcgagattgcgccactgcactccagcctgagcaacagagtgagactctgtctcaaaaaaaaaaaaaagaaacccagtttctgatggcagagcttggcctgggcaaaatcaaagtcaagtccaggccagacacagtggctcacgcctgtaatcccagcactttgggaggccgaggtgggcagatcacctgaggccgggagttcgggaccagcctggccaacatgggtgaaactccatctctagtaaaaacacaaaaattagctggacgtggttgcacacacctgcaatcccagatacttgggaggccgaggcaggagaatcgcttgaacctgggagacagaggttgctgtgagctgagatcacgccaccacactccagcctgggtgacagagcaagactctgtctcaaaaaaatttaataaataaaaataaaaataaatgaaagtcaattccggcgtccgagaggccgctgagaacctgaagccacactcagctaacctgacttctccttcagttcaaaccctcaggcacctcacatatctaagtaaagtcgccccacgggataagagaagtggacatccatttgagagagtaggggacaacagacaaaaagaagacggaagactcctgaagcagaggccacagatgacacaaatgcacccgggacactgtgtcccccagtgccgtctaagtaggatgcccgccaagttcactgacctgagaactggaaagacccacaatgtggggcccgcccccgtccaggcagatgcccccaccatgacaggcgacagcgtctcctgcctgcttctcattcctgttacctggctgcccctgaaggcttctgaggttgtggcctctaccagaaaagttctttcatcatggtgctttccctttggaaaaacctttcaaagcagtgtatgaatgtgtttactcggtcccttattctatgagggtgagcacccacctcccagacagaccaggactcgtaaggccccagggagcacaactcattttagccctggagaagcctccataggcaagagagaaacgagagcaccgcagcgtgagaccaagtgtcactgggggtgctccacgaaagggcacagttagccacaggcgggggccaggagttcagagaaagtattacagcctggactgcagtcccagaaggcttcctggagggagcggctcatgggggcccctcgctgctcactcacagaccaagcacactgctgggagcttgttaagctgagtttataacaaactccctccaaactgagccttagtctaccacgtctctggaaccattcatgcctcaggacaaccccgaggctcagtgcacttacaatgccatggatttgggccactttgctgcacaagtcagggcggcacttttgcagagccagatagaaaggatttttcaggaggtcttcatcatacagagccatatggacttcagatgggtcagagcaaatctcctgcaataagggagggaaaagcagtgaatagccattttcgagtttacgtaacacatgaaagtctgcatctgatgcatctggcattttctttttctttttttttttttttttgagacagagtctcactctgtcgcccaggctggagcgcggctcagcctcgggagtagctgggactacaggcgcccaccaccacacccgcgaatttttgtatttttagtaaagacagggttttgccatgttggccaggctggtcttgaactcctgaccagcaggtgatctgcccgcctcagcctcccaaagtgctgggattacaggcatgagctgtcacacccgacctgcatctggcaatttctaaagagtatcctccaaataaaaaaggattcatgacgtgccatttttttctcccacagactcactccaccaggaaatctcaaatacaacccactaattccaagatgacccgtttattggctaacgtgtaaattatgctcagaaaatcttgttaaactccaagtcttggctaaagtataaatggctatttttagaatatcctacatgaccaaaattatgacattctcaagatactcatttatttttaatgaaatattttagcacatggaaaagtactgagtaataatgcaaacctagcaccagaattaaggaatcgtcacattttgccatgtttgcctcagattttcttttaagaaataaagtggaagccaggtgtggtggttcatgcctgtcatcccagcactttgggagcctgaggtaggaggatcctgtgagcccaggagttcaagaccagactgggcaatacagcaaaaccctcacttctacaaaaataaacaatttatctacaaaaaaaaccaattatctacaaaaataaacaataaaaataaacaattatctacctctacaaaaattaacaattatctgggtatggtggcatgtgcccgtagtcccagccactcgggaggctaaggcaggaggatccgcttaagaccaggagttggagaccagcctggacaatatagcaaaacactatctcctcaaaaattaaaataataaaatttctgttagtctgtgctatggtctaaatgtttatgtcccccaaaaactcatatgttaaaatactaacccgctaggcggggcctttgggggtgattaggttacaaaggcagagccttcatgaatgagatcagtgcccgtaattatgcagccgggcacagtggctcatgcctgtaatcctccctttgggaggccaagtcgggaggatcacctgaggtcaggagttcaagaccagcctggtcaacatggtgaaaccccgtctctactgaaaatacaaaaattagctgggtgtggtggtgcatgcctatagtcccagcttgggactgcccaggaggcagaggttgcagtgagcagagatcacgccaccgcactccagcctgggtgataaagcgagactccgtttcaaaaaaaagaaaaagaaagaggcctgggagagctcctttgctcctccggccacgtgaggttacagagaacagacagctgtttatgaagcaggccctccccagacatccaacctgcaggatcttcaccttgtacttcccagcctccagaactgtgagaaacacatttctgtcattttcaagccttctattacagcagcctgcatgggctgagatagtctatgagtataaagccatatcccactgtttttcattttcattggttcattaattaaatgaactaaatttctttcggttatgtaaactgcctgatcatgtcttttgctcactttcccgctgggttgttggcctttttcttaggatttatagttctttacacatctgtatactaaagtaagttttaaatatcatctcccaggctggctgtaatcacagcacctggggaggatgaggtaggaggatcacttgaggtcaagaggtcaagaccagcccaggcaacatagcgagaccccatctctacaaaaaaagttttaaaaattagccatgtgtggcagcccatgcctatagtcccaggtactaaggaggctggggcaggagaatcacttgagcccaggaggttaaggccgctatgagccatgatcacgccactgcactccaccctgtgtgatggtgcaagatgctgtctaaaaaaaaaaaaaaaaattatacacacacacacacacacacacacacacacatatactcacaccatctcctagtctgtaacttgctttttcattttgtcaaatgggtgtgttcagaaatagaactttggatgttatttattttgagacagggtttcacactgtcgcccaggctagagctggagtccaatgacatgatcgtagctcaccgtaaccttgaactcctgggctcaagtgatctcccacctcccacctcagcctccagagcagctgggactgcaggcatgcaccaccacgcccaaccttttttttattttttactttttgtagagatgagattttgctgtgttgcccacgctgaacttgaactcctggcctgatgcaatcctcccacctcagcctcccaaaacgctgggattacaggcatgagtcactgtgcctggccagaagttttgatgtgaatggaccgtcatccctcagtatacttgggggattggttctgggatcctcttgtatacccaagtccatacatactcaaatcccatggtcggccctgtggaactcacatgtctgtgtcagccctccatatacagaaatttgcaacctgtgaatatggtattttcaacctgaatttggttgaaaaaaacacatataagtggacccacacagttcaaacccatattgttcaagggtcaacaataattggatttgccactctttgcttttaaggtcagtgctttttgagccttaagaaatctgtaattggcatgcctatcctctggcaggtctttttgcaaagtgacttcactattcccccatcagaagatagagtaggccaggcacggtggctcacgcctataatcccagcactttggaaggccgaggcaggcagaacacttgaggtcaggagttcgagatcagcctgaccaatatggcaaaaccccatctctacaaaaatacaaaaattagtggggtgtggtggcatgtgcctgttatcccagctgcctgggaggctgaggcaaagaatcgcttgaactcaggaggcagagattgcagtgaccccagatcctgccactgcactccagcttgggcaaaagagaaagactcagtctccaaaaaaaaaaaaaaaaaaaaaaaaaggaagtagactcatttccgcagcccctgaatcagagccagccctgtgacttgcttcaaccaacaggcagaatcgatgctgtacaatttgtgagtgtcagcttcaagaggtcttacaggggctgggcacaatggctcactcctgtaatcccagcaccttgggaggccaaggcaggaggatcacttcaggccaggagttcaagactagcctgggcaaaatagcaagaccttgtctctacaaataataaaatacaaaaattatccaggtgtgctggcacatgcctgcagtcccaactactcgggaggctgacatgggaggatcgcttgagcccaggagtttgaggctgcaatgaactatgattgaaacactgcactccagcctaggcaacagagtgagaccccatctctttaaaaaacaaaaaaaaaggccaggcacggtggctcacgcctctaatctcaacactttgggaggcctaggcgggtgggtcacttgaggtcaggagtttgagaccagcctggacaacatggtgaaaccccgtctctactaaaatacaaaaattagccaggcgtgatggcatgtgcctgtaatcccagctacttgggaggctgaggcaggagaatcacttgaacccaggaggcagaggttgcagtgagccgagatcacgccacttcactccagcctgggtgacagagtgagattctgtctcaaagacaaaacaaaacaaaaagtcttagtacattcaagaaataagaaaagtaaatgtatatacatacatacacacttataaaagggcttgcggattccattctcattctcttggtaccccaagatcccaatgctatgaagaagcccacatgatgaaaggccatggggggagagcgaggcctaggtggcccagcaagcacagccaacccaccagcagaatacagccccttgagggatcccagctgagaccagtagaggaaccacccacccaactcacacaacgtaggaagtaataaattgtggcagtttgaagtcactacattttgggtgggtttgttacacagcaaaggctacctgaaaccacgtcctttccaatttcaaagccataaagatagtccttatgatttctaaaaagagtaaagttttctatttttaggtcttcaatccatctggatttttgtacatgctataaatcaagtgtctaattatatttctccatatagtaagccaatcgtcccatcatcattttttgaatattctatccatttcacacaggttgataatgctacggctgtcacactccaagatcccacgtatgtttagcctgtttccaggctctactctgtttcaagggtcttactgtcacatgtgagaaatacaattatgtatatattacatagaaatacacaatgtcattttaaattttctagtagcacattaaaaaagaaatagggggccgggtgtggtggctcacgcctgtaatcccagcactttgggaggccgaggcgggcggatcacgaggtcaggagatcgagaccatcccggctaaaacggtgaaaccccgtctctactaaaaatacaaaaaattagccgggcgtagtggcgggcgcctgtagtcccagctacttgggaggctgaggcaggagaatggcgtgaacccaggaggtggagcttgcagtgagccgagatcccgccactgcactccagcctgggcgacagagcgagactctgtctcaaaaaaaaaaaaaaaaaaagaaagaaatagggtgcaattaattttaatgatatattttatcttaatatatccaaaatatgatattttcaacatgtgaccattatttattttgttttttagagacggggtcttgctatgttgcagtggctattcacaggcacaatctcagctcaccacagccctgaactcccagcctcaagcagtcctcccatttcagcctcccaagtagctgggaccacaggtatatgtcactgcacttgacttgatcattatttaaaagttattggctgggcacagtggctcacacctgtaatcccagcactctgggaggctgaggtgggtggatcacctgaggtcaggagttcaagaccctggccaacatcatgaaaccccgtctctataaaaatacaaaaattagccaggtatgatggcaggtgactgtaattccagctacttgggaggctgaggcagaactgcttgaacccaggaggcagtggttgcagtgagccgagattgtgccactgcactccagcctgggcaacagagcaagactccatccccaaataataataataataataataataataataataataataataaaaagttcttcatgatggccgggcacagtggctcatgcctgtaatcccaccactttggaaggtcaaagcaggtggactgcttgagtccacgagttcgagaaaagcctgggcaaccccatctttacaaaatacaaaaattagccaggctactcgggaggatgaggcaggagaatcgcttgagcccaggaggcagagactccagtgagctgagattgcaccactgcacagcagcctgggtgacagagtgagactctgtctcaaaaaaaaaaaaaaaaaaaactgttattaatgatatattttacatttttttattcttaagtctttaaaatctagtgttcattttacatttacagcacttctcgattcatactagccacatttcatgtgctcaatagccactagcagctattacactggacagggcagggagagaccacatatgaacatttattttacatgactacagcttcataataagccttactaactcacagagaaaagctcccctccagcttgttctccaaaggttattccttgtcctttacaatatcaaatgaatcagaatcaccttgtcaattacatgaaaaatcctattaggatttttattggacccgcactaaattcatgaattttttttttttttttttgagacagagtctcgctctctcacccacactaaagtgcagtggcacaatctcagctcactgcaacctttgcctcccgggttcaagcaattctcctgcctcagcctcccaagtagctgggattacaggcacccgccaccacaccaggctaatttttgtttgtttgtttgtttgagacagagtcttgctctgtcacccaggctggagtacagtggcatgatcttgactcacagcaagctctgcctccagggttcacgccattctcctgcctcagcctctcaagtagctgggactacaggcgcccaccaccatgcccagctaattttttgtatttttagtagagatggggtttcgctgtgttagccaggatggtctcgatctcctgacctcgtgatccgcccgccttggcctcacaaagtgctgggattacaggcatgagccaccgcgcccagcctgccgttttttttgtttttcgagacagaggtcttgctctgctgcccaggctggagtacagtggcgcaatattggctcactgcaacctctgcttcctgggttcaagcaattctcgtacctcggcctcccaagtagctcagactacagactacacgccacaacaccagctaactttttgtgtgtattttttggtagagacggggtttcgccatgttggccaggctggtcttgaactcctggcttcaagtgatcttcctacctcggcctcccaaactgttgggattacaggcgtgagccaccacactcagccctataattatgaattttatcatccacatacatggtatatctttccatgaatgtcttcttcgatgtcctccgacttttccataaggatcgtatacgacttttattagactatttatatattctgtatagactttgctgctgttgtgaaaggggttgctaaaattagattgcttattttaggtaaggttctaaaagcaaaagccaaatggacttacatcagagtcacgctgtacagataaaataagaatcagtatggaacacacctaccactaccatcagaactgggacttctgaagccagagaagacccttccatgattcatgactgaaaggtctgtgaacggccaaaagaagattacaggtcagtgttcaactcactttaggaagtaagctgtttgaaggatgttgctgtctgcagactgctccatgctgctaactaatgtgaaccagtgctttgtgtgtttcatgaaacattctatagctgctcctcatcacccctggtctgctcctctgagccaatgagctctcagagggggtgcctacaaaatgggcacagaaaaggaaatcagatttctatttttttttttttttttttttgagacagagtctcactctgttgcccaggctggagtgcagtggtgcaatctcggctcactgcaacctccacccctgtgatcaagtaattctcctgctgcctcagcctccctcgtagctgggattacaggtgtgcactaccactcccggctaatttttttatttttagtagagacggggtttcatcatgatggccacgctggtctcaaactcctgacctcaagtgatccgcccacctcggcctcccaaagtgctgggattacaggcgtgagccaccatgcccagccaggagatcagatttctaaccacgtcatcccacctctctgagcctccatctgggcctgcaccacagagaatgctaatacctgtctgcaggactcttatgagggtcatttccatgccaccttcactatctgtgacatgcagtactgcatatcaacatagcaccagttactgcaagctcacatgggacctttgtgagaattagaaacaggcacccgacttcccagggggcgcagctctgtgcaagggcactaggctagtgagcagctcctaggtaacatgctgcacggcccctgctgctgggcagtgaacaacctgcccacaatgtgagcacaattttgcccaacaattacacataatggctctcttgctagtgtttgacattttccttcaataacttattgtctttataaaaatgtattttcctttctgttttatttttgtttacttttgtagaaatggagtctcgctgtgttgcccagggtggtcttgaactcctggctcaacaggcatatgccaccatccttggcctaaaatttattttaaaaagaaatcttattactactttaaatagaaaaatggtatcacttccaacgaagagaagatcatcttaaagttaaaaattataaaggtaattactgttatttaaaacctcataatcccagcactttcggaggccgaggtgggcggatccagcctggccaacgtggtgaaaccccatctctattaaaaatacaaaaattagccgggcgtggtggcacacacttgtaatctcagctactcaggaggctgaagcaggagaatcgcttgaatccaggagatggaggttgcagtaagccgagatcatgccattgcactccagcctgggcgacaagagtgaaactccgtctcaaaaaaaaaaaaaaaagtcattagatgctaagcttgagcctggggccttctctcttcattaaaatgagaaaatcagcaactatttaaaaagcgtaaaagtgaatttatccttgatacaattaaatgaatgaaatatgaaataggagctactctctcactatgtaacagggatccagaatgcttccttgggaaaacactatgcatacataactgcatgatgaattctattccttggaactaatggtaaaaatagccaccatttgggagagtccttgtaccaggcactgcaataacttctatacatcctcatctttacttacttaccttcatttatttatgagttggggtctcactctactgaccaggctggagtacagtgacacaatcatagctcactgcaccctcaaactcctggcctcaagcaatcctcccaccttagcctcctaaagtgccacaattacgggtatgagccacctggccaagcctaaattttttgttttgttttgtttttggtagaaacagtgtctcactatgttgcccaggctggtctcaaactcctgacctcaagtgagcctcctgccctggcctcccaatgtgctggggttacaaggcataagccactgtgcccagtcttatcttcatcttttttttttttttttgagacgggtcttgctctatcactcacactggagtacactggtacaatcacagctcactacagccttgacctcctgggctgaggtgatcctcctgcctcagcctcccaagtagttgggactacaggcatgagccaccatgcctagctaattttttttttattctttgtagagatggggtctcactaagttacttaagcaatcctcctgtctcggactccagggtgctgagattacaggcgtgagccaccgtgcccagctaattttttaattttcagtacagatggggtctcgctacattgcccaagtgatcctcctgcctcagctccccctaagtgctgggattataagtgtgagccactgcacccagcactcatcctatcttaatgctcacaataactctaggcaagtaggtatcactagcctgtgtcacagatgaagaaactgagatgcagctggctgactcaaggataaataagagccattcattcattcattcatttagtagagatggtgtctcgctatgtggcccaggctggtctcatactcctggcctcaagtaatcctcccgcctcagcctctcacagcgctgggattacagcgtgagcaaccatgcccagcctaagagtcatattttatttcaacagaagaaaagtccacaagacagacagccacacaggcccctcaactaattccccaggtccagccagaactgtcttggctgcaggtgccctgggttctgcttgaaaaaggcctgtgagctctccgccagtcctcctagggagaagagactaacataaaaatggtcgcatataatccctgcctgggccccaggggtgcctctgcaataactcagctatttgaatcattaaattcacttattactggagcccagataatccttttatgagtctccaccacaatgagataatgcaattttgctgggacagagtcacaagaacacaaaactctttctagttcctgacatagttggttctatgtggcacattgcaaaagtaaagatgctctggatgaaagccatgtgagaaacaggatgcaatatggtcagactcaagctgggaaaaggcgctccttctgcttcagaaaagatgctggaggaacaccaatacttccaccccgcaagatgaggcaacaaggacaggcttccatggacgaactaaaaacagagctgggaggtaaggaccagagacagaagaaaacagcagtggtcgggcgtggtggctcacacctataatctgaacactttgggaggccaaggcagtggatcacctgaagtcaggagttcaagaccaccctggccaaaatggtgaaaccccgtctctgctaaaaatacaaaaattagctgggcgtggtgatgggcacctgtagtcccagctacttggaggctgaggcagaagaattgcttgaacctaagaagtggaggttgcagcgagccgagatggcgccactgcactccagcctgagtgacaggctgagatcccgtcacaaaaaaaaaaaaaagaaagaaaatgaaaaaaacggcagggaaggggatgaactagaggatgggaaagtagtaagactccaagcagaggccagaaaggggcagaacagcaagagacaggaaggtcactgagtgccacatcaaaacatgcaggtcacatgcaagaactgtgtaaacacaccacgcccttaacaagcactgctgtgcggacagggcctgctgttatccagccccaagtcatctgctttatcttggacctcagtcttcttggtcactaaagactgaatcctctgtccaggagtagggattcaaagagctctgtcctttcatccgtgctgtcacatgaaaaaaaaagaagaaaaaggacctctgtccgacactgttctcaacctttctgtcctagtgttaaaaatacgtaacatgcagggtgcagtggcttgggaggccgaggcgggcggatcacctgaggtcaggagtttgagaccagcctggccaacatggcaaaaccctgtctctactaaaaatacaaaaattagccgggcatggtggcaaacccctgtaatcccaggtactcaggaagctgaagcataagaatcacttcaacccaggaggcggaggttgcagtgagccaagatcatgacactgcactccagcctgggcaacagagggggactctgtctcaataaaaaataaaaaatgtaaattaaaatttaaaaaagggccaggcacagtggctagcacctgtaatcccagcactttggaaggccgaggcgggctgatcacttgagatggagttcaagaccagcctggccaacatggtgaaaccctgtctctactaaaaatacaaaaattagccaggcatgggcacctataatcccagccactagggaggctgaggcagaagaatcacttgaacctgggaagtggaggttgcagtgagccaagatcacaccattgcactccagtctgtgtaacggagtgagactccatttcaaaaaatgacaaaaaaaaatctgtaatatgccaggtgcagtggctcacacctgtaatctcagcactttgggaggctgaggctgacagatgattgagcccaggagttcaagaccagcctgagcaacaaagtgagaccctgtctctacaggaaaatcaaaaaattatctatgggtatggtggcacacacccagccaggggaggctgaggccagaggatcacttgagcccaagaggtcaaggctgcaatgagttatgactgcaccactgcactctagcctaggcgacagaggaagaccctgtctccaaaaaaaaaaagtaataatctcatatgatctggtgcttaatgccagagttgaattcttacataagggtaaatgcttaaaaaaacagttttataccctgtcaagtttacctgcaagaattagtttgctggctgggcacagtggctcacacctgtaatcccagcattttgggaggccaaagcgggtggatcactggaggtcaggagtttcagaccagcctggccaacatggtaaaaccccgtctctactaaaaatacaattagctggttgtggtggcccacacctataatcccagctacttgggaggctgaggcacgagaatctcttgaacctgggaggtggaggttgcagtgagccgagatcgggccactgcactccagcctgggcaacagagtgagacctatctcaaaaacaaaacaaacaaaagaattagtttgctattttaaaataacatgcaaagaaaatggactttttcttgtaaaactggaaagataagtgaatcttcttataaaacttcttttaaaaaattccatccctgcctgggctcaaatgatgggaaaatgtacagaaaatccagttgagttagctggagataccaaatacctctaaatgtgagttatctgcagttattctatgaacaggagagccatgtgaggcctcaaactagtatttcagggagcagcgtgcacactcgtggttttgtggtcttcaaccgtcctgctagcccagataagtctgggtggtcaagaaccgtctggtgacagcgtgcagcccagctcagcagaattcagcatgggggaattcagcctccttagagatgcactccctgctgaaatctcactgcgatggccgttcccgcccttccggggctctgaccaaacactctgaccaggaacgcttcccaacagataagcagtattctccatttggtctaatttatgattcagaaggaaaaggcgaaaaacgaaaactttctattcatctatttttcacaccaatggaagcaatgtggtgatgtatgtatgctgttacagtcacttgtgtcctcctgacctataacatttagagatcctgtccatattcttctcaaagcttctcattaaagcacccagccctgcgcctggttccctgcagagatggagtaactgctcacccacttgaacaaaacgatagtggggcattaagaggaagccccagctcccagggagaggtcatctctcacaagagctggaactccactgtccatatccagggtaggtgaggggctaaccccaggtcatagccaagcaagcacaaaggcaaaaagcccaaaacaatcaggatgctcagtgccagcccaacacagtgatagctggaatgggcagggctagagagaagccaggactggaaccagggcgggaccatgcagggagcgggaaagtttggaggagcacaacagcccctccgaatgccaccgcatcaccctgttcccggaccacagggagaagaaccaccatgcaccctccaccagtatcttgggcagatgggcaggagctctagggccgcttctcagtgttcctcagatggagaatcaacctcaggacaaatcaagtctggatccttctgggctgaatcctttctaggattggtacctatcatgacatggtcacattcctccactcctctatgagaggatggagtcattggacaccaacctaatgctggcaaatgacagacaggaagagccccagcagggcagatgccacagaaaccttaactgggacacagaaacatcactaacaaagacccagcagctgtcttggtgagggagacacagtctaacagtcacaaagaggcacaacggagaccctaacccccggccctctgcagacacctctgcctgccctcccagggaagctgccggccaagattatttcaggtcaccaggcaagactgggtgtaacttgggaatgtaagtctatccaatgtcagatccccaggtgcattcctgtccctatggctggtcagaagaagtctctgctcctgctcccatcctgcatcccctccttccaaggcctacgggctgtgcctcctggatctgccccctggatttcactcacgcctgtccaccagcaacacaacaaagcgatctttccagcgccgagctctgcaggattcctcaaaggattcccctgcactccccaccaggtgagccctcaacttctctgctaggtgctcaggacctggcacatctggcctctggccacctttgcagcttcctcaccctctgctgtctccaaagcttcccccgaagggaaagagtattttccctctttccacccattttgtcctgaaaactactatccccctgggaacgaccctatgtagcgtgtgggtggctgagaaccccccttccacacaatggtcaaggccaggagtacccaagccctggcagcaaacacccagcctactgctcacccagttaaaggacggacccctgggtgacagcaggccccggggctcagtacaccggacccttaggccacctcaacaccagtcctcatgccaggctgatctcgaaacgtaacagctactgctcagcaaaacgtggtggctagtgcctgtaatcccaacaccttgggaggccaagacgagagcatggcttgagtccaggagttcaagaccagcctaggcaacctgctagactccatctctacaaaaaaaaaaaaaaaaaattaaaaattagccgtgcatagtggcatgcgcctgtagtcccagctactacagaggctgaggtgaaaggattgcttgagtccaggagtttgaggctgcaatgagctatgatggcatcactgcactccagactagccaacagagccagaccctgtctcaaaaagaaaaaaacgaaaagaaagaaaagaaaaaaaatatccactgctctactcttcggccagtgggaagagtgcattttttaatcaaaataggggcctctatccatgaaacccatcaacttgtaaaatctgagctctctgcagcctcacagtccctccagcactgccagcagccctcgttccctgcatgctctaaatcctcagcgaagacccgtcccttgctccctcgcccagcacaggccgcgagtgcccacgtcccctgcacctcgtggggcagccaagggggcaccgcgtggctcgtgtgctcctgggcagtccattttcaaccacaagacggaacagactcagaatccggaacatctctcggtgcttaagagttttcctttaacaatctttacctgtgggaatgcagagacccccccgccctgcgagaggccggcagccagggattccccgctccgcgccctcatcaccccccggaaaccacaaccgctgcgcgcgcggctcggacccccacccgccgctcccctccagcagaccctaggcctccgggaaaccgcgcggcgaccgccccgcgccccgccagatccgaaccgccggacccggcaccccggccacacccgccggtgtcgacgcagcgaggctcggagggtgcattctccgcgccgaccgctcccctcctccagacccgaggggcggagtgggcagggcgcgccggctgcgcaccgggcacccacctggggacgcgggggctggggcggcgcggggccacctggcggacccgggagcggactccggagagcagggagcccctcccccctcactctccgggccccgcccggccgccgcgccccgaggcgcagccatcccgcgggaggggaggcgcaggaggaggccagcgcgaggacacttacttaaaaggctacatcgcttcattcccagcccatcctgggcgacggcggcacctccctcgtccgctgctgggacctcgatgcccaccaccctcgcgcggcgatctggccctatagcccaccccttactccgccgtggggcggagccgcgccacagctgacccaatgagaaaccgtcgtttcccagagtgacgtgtacgcagagcaatcatggagtccagcccagccgggggcggggctcaggcggctccctacgcttcctactccagctggccccgccccacgcccgcaactgcgcgtgcccagaacgtgaggggcggggctgggagccgggctgacactagaggtggggttagcgcttggaagcaccgaccaacgtgagcgcaacgcggcagggacacctgaccccggcggcgcccagcccctcggattgccagtcactgctcgctttggggcacggaggtgcccagtcctgcggggcacccgacgtcctgtcgccgacagggtccgggagtcagtatagctgggttctagtcccatcacaggcaaaaactccgcgggagcctggcccgctttttacctgggcctcagtttccccatccgtaaaatagaacgggttggatctcccgagcgctaacattccagaactcggatggggcgaaggggagggagggatgggccacccacacgtgacctccccgcgtggagccccgcctaccactgatccagggggtggcagctccggccgggacgagcggggtgggcgggtcctaggaaaccctacccggccgcccttggcagcgcctaaggcggagcgcgcggctctgcagcctgcttgccccggagttggcacccacggaggatggggaccgcaccctcagcttcgcagggagccaccgtggaggccagggcggtgcagagacacgacgtgtgactcggagtgcgcctggggaggatggacgagggagcgggggaccgctaacggggctccctctgcgcgccccgtccgcagaggcgcacgtcgagggtcccgggcgggctccgtggacgttggcggtagcgccgagcgagtcacggaccatgaagagcgttcgtgccgcgcggcccaaggccgggatgggggttagccacatcctgccgcgctgagggggaggctaacgggcgcgggcggccgggcccagccggagcccaccgcgatggcgagggaggagtgcaaggcgctgctggacgggctcaacaagacgactgcgtgctaccaccacctggtgctgaccgtcggtggctcggcggactcgcagaacctgcggcaggagctgcaaaagacgcgccagaaggcgcaggagctggcggtgtccacctgcgcccggctgactgctgtgctgcgcgaccggggcctggccgccgacgagcgcgccgagttcgagcggctctgggtggccttctcgggctgcctggacctgctggaagcggacatgcgacgcgcgctggagctgggcgccgcgttcccgctgcacgcgccgcggcggccgctggtgcgcacaggtgtggctggcgcctcctccggcgtggcggcgcgcgcgctgagcacccgcagcctgcggctcgaggcggagggcgacttcgacgtcgcggacctgcgggagctggagcgcgaggtccttcaggtgggcgagatgatcgacaacatggagatgaaggtcaacgtgccccgctggaccgtgcaagcccggcaggcggcgggcgccgagctcctgtccacggtcagcgccggcccctcctcggtcgtgtccttgcaggagcgcggggggggttgcgaccccaggaaggccctggccgccatccttttcggcgccgtgctgctggcggctgtggccctagccgtgtgcgtggcgaagctgagctgacggacacccgacggccgcctgctgctgccgctccctcccctgagaaaagactcgggatgggtgtggggtctggcctgtgcaaggggagtggtcctaaaaccccgtgtgtgcatgggtacacgcgcgtttccagtgcacatctgcctgggcaggacacggtttcctcttgctggcccgggaggagttaactttgcgccggccgtcagggcattaccgctaacgtctgcaggagctttattccctattaatagaaaaccgtcacagtgaccctagatccctccgagttaatgagttaacacatgtgctgttggggcgtctttacagggagtccgagttcggtgcccacccctgccagcgtcgccccctttctgcgtgggacagtttgaaaaggtgggtggggtggagtgaagtttggagagggacgctgtttggttctatgtggttggtctgtttcccggacaagaaaaattgcaatcaaatgtcagcagcttttattaccttaatctttcagggcctaaatttaggagagtgtcccgagagcagttcatacaaagggctttctctaagacgcgctacagcccttcctagcagagtttatccattcgtccccaagagcagctagaagagatttgaggtcatgacctcccactgccgctcaggggctgaccctatttaggaaaccaaagagggtgggttgaacctactctcacggacttggatccagtgcgcacacttgcctgcggaaaagggctctccccagccacccggagatgggggtaagaggaagagcagaggcttggggtagggccacctggtgtttaaacaggcactttctccttctctggggcttatttttgttcagaactagaccagagtgtttgaacctcctttgcaggagggctgggaatcctctttagagcacttaatcctatttatcccctggaatgtgcgtgctggccagtaggagggctggctttggcagctccctgacccccgcgctgcccgcccctccggggtaatgtggcattactggcccacagaggttttgagccaatcagctctgagactgggttagaatgtaacagctttaacttgggatttaagaagcttttaaaaggtaataatactctgaaagaaaaatgacgtaaccacagcgtgtactatgaaagctgttattttaataaagaacgctgggccatgaactcatacctgccaatgagtcaaacatagtatctttatgtagatacttagattactaaatatatatttcatctacttctgaagttgatagtcttcccccccccccacttttttcttttttgagacagggtctccctctgtcacccaggctggagtgcaatggtgtgattgtggctcactgcagcctccaaatctcgggctcaaactatcctcctacttcagcctcctgagtagctggaactacaggtgtgtgccaccgcacctggctaatgtttttaaggcagttaatttatttatttatttttatttttctttagagataggatcttgtggtgtcgcccaggctggagtgcaggggcgcaatcagcaaaccacagccttgaactcctgggctcaagctctcctcccacctcaccctcccaagtagctgggactaaaggtgtgcatcacggcactcaactaattttttgtagagacagagttgggctatgttgcccaggctggtctcaaactcctggcctcaagtggtcctcccacctaggcctcccaaagtactgggactacaggcataagctactatgctcagtctaaaatcaatattctttatttttttctataatttcactgcaaaataaaatctatattcttgagtagccacacaagtgtaaatgacagaatgttaagtggcctttaattcttttgatcaacaagtaagaaaatgcttggtccttggtcccaggatgacatctgcctgagcagtgctgccaaatcctgcctgtggtccagagagagctctgtcccattcttgggtaagttaggctgtaaaaacagatgcatttaactttcttttctttttcttttttttttttttttttgagatggaattttactcttgttgcccggactggagtgcagtggcgtgatctgggctcactgcaacctctgcctcctgggttcaagcagttctcctgcctcagcctcccgagtagctgggattacaggcgattgccaccatgcccggctaatttttgtatttttggtagagatggggtttcactatgttggccaggctggtcttgaactcctgaactcaggtgatctgcccacgtcagcctcccaaagtgctgggattacaggcgtgagccacctcgccaggccacatttaactttctaaaggtaatttgcaataaattccagagactttggctgaaaactgacaaggattttttttttaattcttttttaccccagaagtgagaacaggggtgaccaggggaaaggaattggccatttttcacatgggccgcttggaggaccaaggggcagaggtggatagcagaagggatgctgtcaggacacccagacttaagattcactctccccccaaccccccactattcctcaggaggaccaagagattccagcagctcagatagggcaaatgtaggatctgtgtttgtgtctgtgatcatgcttttaaaagacccacaaggtcttaagctgattaaatgttttgcaattactttttttttttttttttttttttaagatactgggtctctatgttaccggggctagagtacagtgtcacaatcatagctcactgaagcctcaaactcttgcgcttgagagatcctcctgtctcagcctcctgtctgggactacaggcgtgcaccatcacaccctgcaaatttttaaaatatttttattttttagttcttgtacaaatggagccttcactatgttgcccaggctggtctcaaacacctgggctcaagcagtcctcccacttcagcctcccaaaaccctgagatttataggcgtgaaccaccatgcttagctgacaattactaataacaagaacctcttgcttcacccagtgtgggtgaatctgaataggggccacttcaaattcttttgcacctggttgcccagagtgcctttgaaaatgacatagaacgtttttaagccactcctcccacatatggactctctcgttaccttccccagagtctcatctctggcaagagaaggctgggacatttcattaccctgtgttggaaaatatacctaggccagcacagtggctcaagcctgtaatcccagcactttgggaagctgaggcaggtggatcacctgaggccaggagttcgagaccagcctggccaacatagcgaaacccgatctctactaaaaaatataaaaattagccgggcatggtggcacatgcctatagtcccagctactcaggaggttaaggcaagagagtcgcttgaatgcaggaggtggaggttgcaatgagcaagattgtgccactgcactccagcctgggcaacagagcaagactctgtctcaaaaaaaaaaaagaaagaaaagaaaatgtatctaaaaatgaagtcctaaaggtattctactgtttctaagactgggaacctttgttcttatcaaggtgtttcgggttatgaatttttttttttaaaatggtttagcagaacctattgttgaaacaacccatcagatgtgtgtttcactgagggcagtgggaaaaacaaggtttttctttttgagacagggtctcaatctgtcacccaggctggagtgcagtggtgcaattgtagctcattgcaacttcaaactcctgggcccaagcgatcctccttcctcagcctcctgaattgctgggactacaagcttgcaccaccatgcccggcaggataaacaagtttttgttgttgtcactctttctacccacttggctgatctttgggtatttagttatatgtggatcagatgtgtacttgattctgaaggtcttctgctcgctgaaattagtgataaaatattgcaaaaaaaaaaaaagctgaattacaataaatatactcaccctgttggacctattaacataaacagctctttgagtttgaaaattttaagtattaggggtatttggtattatttggagttatgacattgcctaatagaacttctgctatacgacaagcaaaatcactttctgccttgtgcaataggctgctctctaactagtatctctgctctcatttttatatgtaatgcaagagattgctttctaatagaagcctgattaaattgagatgtttgatgcataagtcattaattttctgtgaacatttagtatgaccttaaactatgatacaagtgtaggaaaaaaaaacaaaaaattcaaactgtgttagctgacactgaaaagacaaaaacttggaatgtcaaggcttttatcatggaaactttgatttcagaagaatgtgatctgggcttttgttattagtaaaaataatatttgtaggagaaaaaaatgcctggcaaattatttttatgtattctaagaacatatgctttttttcttttcttttcttttttttttttttttttttttttttttttgagacaaggtctggctctgtcacccacgctggagtgcagtggcacaactttggatcactgcagcctccacttcctgggcttaagtgatcctcctgcctcagcctcccaagtagctgggattacaggcgcccagctaatttttttttttttttttgtagagatggggtttcaccatgttgcccaggcttgtcttgaacatctgagctcaagcaatccactagcctcggcctcccaaagtgctgggataaccagcatgagccaccacgcctagctgcttttttttttttttttttttttttttgagacggagtctcgctctgtcacccaggctggagtacagtggcaagatcatgactcggtgcagccttgaattcctgggctccagtgattcttccactttagtctctcgagtagctggcactacaggtgcatgccaccacacccagctaatttattttaaaaattttgtgtagatatggggtttccctatgttgcccaggctatcttgaactcctgggttcaagtgatcctcccagctctgtctcccaaagttctgggattacaggcatgagctattgtgcacaagctaagaatatgtgcttttaaatcccataaggaaaaaaatatttttggtaaataaaattaaagcataaatatcatgatttacctgacgtttaccgtaagcaacataaaagatatgtgatactgaatgactaaaaagtagttttggttaaagagagttctagtttccatgaggactctgacaatgctgcattttattttgctttttaatgtgcacattggtacatgtttaactactctactcctgttcaaaatgtacttctctgttctgcaatgaatgctttttaagggtgcgagccccagggcgtgaaatgaatgtggtagaactggcctctacatttcttttgggtgtgtctcctcctgcaaggcctggccagctgcgatgggcagaggacactgcctcgctctccaagtacctcaataagtcattgacctacttgtgcctcatgtctctcatttgcaaaatgagggtcctacctgattaactcaaagattccccttctagagcttaaaacattgaacaaaatgcagttaaacaagaaagggctatgtttgttggttttgtttttgtcttttttggtgtagttggttggttttgtgtataatggaatggaatcatatcatttgctggttattgtctaatattagtttcaaaaactaataaaaatactttaaacttcaaattaattttcaaaatcagaagtaactaagcatatcatgctttcagtgcacatcagaattagtgtatgggcttaaaagcaaatgtgtgtaaatgctacttattggtagtatttaaattagattaggaatttaaattcaggctctaagtcggagtctaagaaagcccactgattattaaaacagtctgttttacccagcaatccaggccacctgaacatcagagcctgggaaacagtagataggaagctctgtcatttgtcttggaggctgggagaatcctatcccataagtaacttggtagccttagaactgcatgagctgctttaccactgggaaacacgagcacagcctagcttgattttgtatgtggtatcagatctaaggtggatggaattcaggacttcctgtctactctttgattttgttttatttttagaaatgttttattttgttttattcatttattcatcttcagagacatggtctggctctgttgcccaggatggagtgcatggtgtgatcataggccactgcagtgttgagctcccaggctcaagcgatcctcctgcctcagcctccttagtagctgggactataggcacatgccctaccatgcctggctttgtctactttttgaatgatgtctcaaactagaaggtctattaatttaaaaaattaaggatagcatgccataattaaaaataataacagtgggaaaaggcaccttccaatgattcagacatcaacttgtgatttaaaaaaacgaaaaataaataataggaaaaaaaggggaaaaagttaaataaaaataaaattaaaaaaaaaaaaagaaacagggccttgctatgtagcccaagctggtctcaaactcctggcctcacgtgatcctccaccaaagtgctgggattacaggtaggagccactgtgcccagcctcaacttgtgattttttttttttgagacagagtctcacactgtcacccgggctggagtgcagtggtgaaatcatggctcactgcaacctccacctcctgggttcaaggatgagccaccacacctggcctcttcttttttcctttgagatggagtttcattcttgtttcccaggctggagtgcaatggcatgatctcggctcactgcaatctctgcctcctgagttcaagcaattctcctgcctcaacttcccaagtagctgggattacaggcatctgccaccacacccagctaattttttgtgtttttagtagagatggagtttcaccatgttggccaggctggtctcaagctcctgaactcaggtgatccacccgcctcagcctcccagagtgttgggattacaggcataagccactgcacctggccttttaaaaatatatatattcttaatttttgatatttgagtgggagtgaacatcctgatcaatgtatttacccttcacagatttcattacataagaagatgttcaggattataaatctccaagtgcttttctgcaatgtgatttttttttctgagacagtctcactcccgttgcccacactgaaatgcggtggcacgatcacgccttactacagcctctacttcctgggcttaggtgatcctcctacttcaacctcctgagtagctgggactacacatgtggtgccaccatgcccggctaatttttatatttctagtagagacagggtctcactatgttgcccaggctgttctcaaactcctgggctcaagcaatctgcctgcctgcttcagcctcccaaagtgctgggatgacaggtgtgagccaccctgcccagcccagcccacaatatgattatactcagattttaatgcaggatgcaatccaagaagataggtctccatatgaaagatctttggctatggtcaacacagatcaaagtcatatttcaaatattgttttttctggctgttaggaactgactgaaggtcatgttgcagtcttctctccatgaggacaagatgaataatatctggaaagatgtttttctcacttatttttcatctaattccatagaagagattctggatgtttttatcgcagtaccatgagatcttgggcatacttgttctttggtgtttgagaattttttttttttttttttttttgagacagagccttgctctgtcaacccaggctggagtgcagtggtgcgatctcagctcactacagcctccacctcccgggttcaacattcccatgcctcagcctccagactacctgggattacaggtgcatgccaccatgcccggataatttttgtatttgctagagatggggtttcaccatgttggccaggctggtctcaaactcctgatctcaagtgatctgcctgctttggccccccaaagtgctgggagtacagatgtgaaccaccgcactggctcgagaattttaaaactttaaggcttattaagaccaatgtaaataagccaaataagagctcctgttgtcaaaaggatttaaagagtacttctggccaggtgcagtggctcacgcctgtaattcccagcactttgggaggctgaggtgggcagatcacttgaggtcagcagttcgagaccagcctggccaacatggtgaaaccccatctctactaaaaatacaaaaattagccgggcgtggtggcatgcatctataatcccagctacttgggaggctgaggcagaagaatcacttgaagccaggcaacagaggttacagtgagccgagatcacaccactgtgctccagcctggacgacagagtgagactctgtttcaaaaatacatatatttaggctgggcgcggtggctcacgcctgtaatcccagcactttgggaggccgaggcgggtggatcatgaggtcaggagatcgagaccatcctggctaacaaggtgaaaccccgtctctactaaaaatacaaaaaattagccgggcgcggtggcgggcgcctgtagtcccagctactcgggaggctgaggcaggagaatggcgtgaacccgggaggcggagcttgcagtgagccgagattgcgccactgcagtccgcagtccggcctgggcgacagagcgagactccgtctcaaaaaaaaaaaaaaaatacatatatttaaagagtacttttaatatgctagtaccagaaagcaaagttgagtgtcccctgcttgtatgtacgtattaggcatatggaaagatctacagggaagtaaagaaataaaaatattattaatatatattaatattaacaaagtggtaggattatgaatggtgtttttcagtatttttccggaatgagattatattgttcttacgataaaattttgaataattttgtcatctagaaaatattattctgttgtttaaattggaatcccagctacctgggaggctgaggcaggagaatcacttgaacctgggaggcacagcttgcagtgagttgagatcatgccactgcactccagcctgggcgacagagcaaaactccatctcaaaaacaaacaaaacaaaagtaaatacaggccagttgtggtggctcacgcctataatcccagcactttgggaggctgaggcaggtggatcacctgaggtcaggagtttgagatcagcctggccaacacagtgaaaccctgtctccactaaaaatacaaaaattagcctggtgtggtggtgcacgcctgtagtcccacctactagggaggctgaggcacaagaatcacttgaaccagggaggcagaggttgcagtgagctgagattgcaccactgcactccagcctgagcgacagagtgagactctgtctaaaaaaaaaaaaagtaaacacagttaaattcactctaaacatgtgcaataatgtaccaataatgtaaacactactacagccaagaagatatagaacatttccatcacccctaaaaagctcccccatgtcactttgtagttctcatccaaaacaccatgggatatcagtttgtaaaggtctctctcttcaaagagggaaagggcaggttgggttttatgcatcccagggtctgtattacacaagaaagtcatattcagcaggttttgggggaaagctgtacatatttatgagggggttgaccacatgtgcaatgggtaaacatacaggtaacatacatcacccatgtttattttggagcaagtttgtgtcaggcgtttgaaccagagcaactccatcttgtataggggctggacaaaatgaggctgagactggtacaggagttaagaagaatttacttaggcagatagtgaaggcatggaagtcctccgtaaagttttcctttctaacgaagagcagcctgtaaaatccagctgcagacatagatccgacagttgtgccactcctgttgaagatggcggctccatcttcccttctctttgtcggccacatgtactgtaagaagcagacaagatgacaccaatcaactggaaagcccatttgcatgataagattagggtggggtgaccagccttccccaagatcatgccactgcactccagcctggggtgacagaatgagtgagaccctgtctcaaaaaaaaaaaaaaaaaaaaatgccaggcacagtggctcaggcctgtaatcccagcactttgggaggccaaggcgggtggatcacatgaggtcaggagttcaagaccagcctggccaagatggtgcaaccctgtctctactagaaatataaaaattagccagatgcggtggcaggcacctgtaatcccagctacttgggaggctgaggcaggagaatggcttgaacccaggaggcggaggttgcagtgagccgagatcatgccactgcactctagcctgggcaacaggagcaagactcctcataaaaataaaggctcatgttgctgcgttagctcatgtctgtaattccagcactttgcaaggccgaggcaagtggattggttgagcccaggagttcaacaccagcctgggcaacaaagcaaaaccttatctctacaaaacatacaaaaattagcccgttgtggtgctgtagtcccagctactcaggaggctgaggtgggaggaccacttgagcctgggggtgtccaggctctggtcagctgtgatagcatcactgcacctgggccgcagagtgagaccctgtctcaaaaaaaaaaaaaatgaataaccacctaaaaataatttctcagaatgatttttaaaaaggttttttttcttttttcttttcttttctttttttttttttttgagatggagtctaagtctgtcgcccaggatggagtgcagtggtatgatcttggctcactgcaacctctgccacctgggttcaagcaattcttctgcgccaccatacccagctaatttttgtatttttagtagagacggggtttcaccctgttgaccaggctgggctcaactcctgacctcaggtgatccacacatcttggcctcccaaagtattgggattgccaggtatgagccactgtgcccagcctgaagtgtaacttttgaggctaagtcataaaaggcatcatggcttcttcctctctcatggatcattctttctgggagaagtttacccaccaagtcctgaagacattgaagcaaccctatggaaagatccatgcggtaaggaactaggccccctgccaacagccatgtgagtgagccattgaggaagtggatctcccagtgctggacaagccctggctgacatgctgatcacagcctcatgggagatactgagttaggatcaccacatggaggtggtccctaatccctgatcaacagaaaaggtgggataatcaatgtccattgttttttgtttgtttttcttgttttttttgttttgttttgcttttgattttgaaacagagtcttgctctctcacctaggctgcagtgcagtagcactatctcagctcactgcaacctctgcctcccgggttcaagcgattctcctgcctcagcctcccgagtagctgggattacaggtgcccacgaccacacccagctaatttttatttttattttttgtatttttagtagagacggggtctcaccatgttggccaggctggcctcaaacttgtgacctcaggtgatccacccacctcggcctcccaaagtgctgggattacaggtgtgagccactgtgccccatctttttttttcttttgaggcagagtcttgctctgtcacccaggtcggagtgcagtggcgtgatcatggctcactgcagcctccaactcctgggcccaagcgatcctcccatctcagcctcttgagtagctgggactacaggcatgtgataccacacccagctaattttctttttcttttttttttttttgagacggagtctcactctgtcacccaggctggagtgcagtggcgcaatctcagctcactgcaagctctgcctcccgggttcttgccattctcctgcctcagcctcctgagtagctgggactacaggcgcctgccaccacacccggctaattttttgtatttttagtagagatggggtttcaccgtgttagccaggatggtctcgatctcctgacctgtgatccgcccaccttggcctcccaaagtgctgtgattataggcgtgagccactgcacctccccactaattttcttttaagaggaggggtctcactgtgtttcccaggctggtcttgaattcctggcctcaagttatcctcccgcctcgccctccctaagtgttagggttacagacattacccaccatgcctggacaataagtgtttattgatttaatccaccaagtttttgactaatttgttaacagcattaggtaaataacatatccacaaattatcctgtgagcagagcactttagatatgaatatgatatctgtatctctttgaatgctcatggatagttctttgcttctgtatcatttcttggctacagttcagataactgagtttatatgacatgatctctgaatccataaactgtaattgtgtcatctcagtgccccaaatatgacagtcatggcagtgtgcacattttggacactgttctgtgttggttaaggtccagtttctgccaggtgtggtggctcacacctgtaatcccagcactttgggaggctgaggtaggcagatcacttgaggtcaggcgttagagaccagcctcaccaacatgatgaaaccttgtctctgctaaaaatacaaaaattagtcaggcgtagtagcatgcgcctgcaatcccagctactccagaggctgaggcaggagaattgcttgaacccgagaggcagatattgcagtaagccgagatcgcaccactgcactccagcctggtgagagcgccagactccctctcaaaaaaaaaaaaggttcagtttctgttgttttgctatgcacccaggaccaggacttggtcatctcactcatgagtaaccagcttctgtgaaaaccagctgatgttgaaacacacacattcacctacaaaaccacggtgttattttacagcaaagggagtagtatgttcttaagacccttaatccctccataaatggttagtcatctgtaaaatagtggtaactgtttccacttcatggggttttgtaagaattacacaactaatactaataaagttcctagtgcctcacacactgtacccagtaactactaatattattatcccctaggattattattactcctagtattgaagacatgttactttaatcacctgagtgcctttctctccattgctctgtatttttattttatttatttatttatttttttgagacagagtctcgctctgtcacccatgccggaatgcagtggcaggatcttggctcacagcaacctccacccagattcaagtgattctcctgcctcagcctcctgagtagctgcaactataggcgcgggccgccacacccagctaatttttgtatttttagtagaggcggggttttgccatgttggccatgctggtcttgaagtcctggcctcaggtgatccgaccacctcggcctcccaaagtgctgggattacaggtgtaagccacagcgcctggccagagaccaggtctcttcaaacaaaaaaacaaacaaaacccctaaatattgacaatgtcatctgtggattctacccaggaaataacccacattaaaatgatggtttgtgagggtcggcaggggtatagtgtatttcatccaaaaacataacaaatgtgtgatccaattataatagcaattatgggaaaagctgtcggtgactgataaggagttataaaagaaaagactcaaatttacacaggcttttcaaaagatcataatcctgctattggaggtggaagtcttctagacactaacaaggtggagagaaatctccatgtggaggcccagattaaacatctcccatcaaagtggaactcgtcaaatgtcctaagacacctaaggccgtccccaggcgccctgacaataaaaggtaaccagaacacgagagaaattactctgggagtacctttcacattcaaggtgtgcagtaggaaatttataaattggcatctggctcgtccattcatttctcattggtgtggttcacgtgtgcttgcaaaggtcagacttctgcccttcgaatgtcctctctccctctcccacagaaaacacccacatgtgggtccttgtttaaagcagaaagtcctagtccttagcttttagtgaggtggatgtcatcaggcctgggttggcatcctgttttttaccatggcaagtcatatgcgcccttaagcattcctgcttttggtccaagcttcctgcgtgggaatactgcggtcctcctttcaggcagctgtgaatgacaaacggtcgctggctgccgtgacacccattgtcccgcgagagtgccctagctgggccccagtgcactcgaggcggtccctgctcgggtgcccctcccacaggcaggcgccgttgccgaccaaacgcccaggttcacccaacgccagaggctcgtcctcaattcccgcgaggcccccggaggtgctggggtccctgcagggccgggccacctgccgtggagctcaggccgcgccagaatcggatccgggaagctgcgcgccatgagcagctccctgcggccgggccccagccgctggcggcgggcggccagcatcgtcctggcggctggctggtcgcgcccggagaccgccaccccgccgtcgcgcccgccgccggccgagggcttccggctgctgctgctgcagcgctccccgcaccaaggcttcatgccgggcgcgcacgtcttctccggcggagtgctggatgcggccgaccgctcggcggactggctgggcctcttcgcgccgcaccacgggccgccgcgcttcggcctgggcccggcgccattcagccgcaccgctttcccgtcgctgcccgacaccgatgaccacaagaccgacaacactgggacgctgcctgaggacgtagccttccgcatctgcgccgtgcgggaggcctttgaggaggcgggcgtgctgctgctgcggcccaggacttccccaccaggcccagcacccgggcctggcctcgccctggagccaccgccgggcctggcctcctggcgcgaccgcgtgcgccaggacccgcgccacttcctgcggctgtgcgcccacctcgactgcacacccgacatctgggcgctgcacaactggagcgcctggctcacccctttcttgcggggcaccactcgccgctttgacacggccttcttcctgtgctgcctgcgcgagccgccgcccgtctaccccgacttggcggaggtggtgggctaccaggtaaggcctgctcagggccttgctgcggaccgccaggacgtgagagggaggacccctcccagcggcccaggcccccaagggacccccgcataggccaagcccagagagattaagcagcaaggaacgcttagacgggctggaaactctcacccctgtagaccaaagccatgctcttggtgaagtgctctctgctttcctaggctttggggtctcaaggcctggagcctgtctctccacgtggttcctccagcgtggccactgtgtaagcacttgtacatgtgtagacatagtacatctccacagccgtttaatttggttttcttggagaacagacttaatatgatccagtcttcctatttttatttatttttggtacagatgggggtcttgtctctctgtgttgcacacccaggctcgtctccagctcctggtgtgtccagaattggttccttccagtgggttcttggtctcgctgactttaagaataaagccgcggaccctcgaagtgagtgttacagttcttaaagatggtgtgtccagtttcttccttcagatgttcagatgtgtctggagtttcttccttctggtaggttcgtggtctcgctgacttcaggattgaagccgcagaccttcgcagtgagtgttacagctcttaaaggtggtgcgtcaggagttgtttgttcctcttggtgggtttgtggtctcgctggcttcaggagcgaagctgcagacatttgtggtcagtgttacagcttataaaggtagtgcggacccaaggagtgagcagcagcaagatttattgcaaagagcaaaagaacaaacctcccacagcggaaggggatcagagcaggttgggtgctggtggctgggtggccagcttttattcccttatttggccctgcccatgtcctgctgattggtccattttgcagagtgctgattggtccatttttacagagtgcggattggtgcgtttacaaatctttagctagacagagcactgattggtgcgtttttacatagtactgattggtgcatttacaaacctttagctagacacagagcactgattggtgcgtttttacagagtgctgattggtgcatttacaaatctttagctagacagaaaagttctccaagtccccactggacccaggaagtccaggggcttcacctctcaatcccgcctctaaacagggcaccccatctgctgttgggaattgggcaatgactgctctagctacttcctgctggacaggggcaaagaaggggccctgcagttgtagtgtcctccagaggggaactctctaggccagtgaaagggccagtgggtcggtccaggggtcctcggtagaagttgttagttgagctcatttgggtttccgtttgtaagaccatctgtagtttgatggccttgattctagaggaaacaaatttgacaaggaggttaaaaatacagggcccgaaggcgagtaatagtaaaacggctgtcacaggatgtagaaaggggagaagccatgttgcccaactccagaggttggtataagagtttgaaaggcgttgtctgatttcagaaaccttttcctgtaaatgccgggcggcatcttgcactatccctgacttgttagtgtaaaaacaacactcttcccctaaggtgcaaagtcctcctttctcagcagtgaggaggtctaggcctcgggggttttggagagtcactgctgccagagtctatttgggattgtagttactatccttactgaatagattttgttatttcttgcaaactgtctgagaaatactttgagagtgtgtggtagtaagataatgaagtagataaactggctattccggttcctgtagcagtggccatttctagccctataagtaggggtatcagttgtatggccctgtgctgatggacttgagctttgaggggcactgatagggtctgatgtccataagattagaagttaggataatatgtgttacactgttaacttttagcaaactttacttttgttgaaaaccttaagtttgggatttcaattattctttgctattaataagacctcgttcagtccatattcacttaaaattggtatagatggctccttcctgattctgtaagtactttaaggtttggctgagtgcaaacagcttgcacatttgagcagaccaattattaggcaattttcctaactctgcttctgtaagagtttccttatcacgtactgagtacccattgtgtctttttccttaatcgcccaggaggaaacatctatcatcctgtcctgaagggggttcctcctatgtctggtcagaccttcagatttagatcccctgttaggaacctgctgggttaaggatttttgataggaaggctacaggttgtcagtggcctcagtgcttttgggctatgcccttgtttacactgacaacaaggtggtattggagtgttacagggttacagagaagaccttcaattatcaattgtaggttttatttttcatttttatttttttggagatggagtcttgccctgtcacccaggctggagtgcagtggcatgatctaggctcaccgcaacctctgcttcccgggttcaagcaattctcctgcctcagcctctggagtagctggaattacaggcgcccgccaccacacctggctaatttttgtatttttagtagagacggggtttcaccatgttggccaagttggtctcaaactcctgacctcatgatctgcccgccttggcctcccaaagtgctgggattacaggcatgaattatatattttaaatttaccctggcttttaaaggaatagggtgcactgttttttctttactacttctatctctttctctctgactcctttgtctcttcctctctttccttctgtctttgactttgcctctttctctctgctggtctttccctgcctctgccagccgcttatgctgccgttctcccttctccttcccctttttgatggcttcggcagtgtaagactgccacctccttgggtttttgcattgagtgcaataactccatgatttccttgtggtatttaatgggggttcccccagaggttaggaacgctctttctttacatattgcagcatgggcatgtaggattagataagcatacttgctatctgtatacacgttttttcttttttcctttcccagttctaaggctcgggtaagtgccactagttctgctaactgggtgctggtccctgggggaagaggtttactttcaagtacggttacatcactaactgtggcataacctgcccttcgtatcccattttccacaaatgaacttccatcggtatataggttaaggtcaggattagctaacgggacttctaagagatcctttcaggcggcataagtctggactactacctgttggcagccatgcttgacccgctccctatcctctgggagaaaagtggcagggctgagggccacacatgtatgcacttgaagcactggtcactcaaggagtagtgcctggtatctaagcaggtggttttctgatagccataaacttcctttggcacctagtttgccatttacatcatgagtagtccagacagtgagatcctttccttgtattattttgatagcctctgacactaagacagccactgccacaactacccctaaacagttagtctagccttttgctactgtatcagtttccttaggtatgccactggttgtggagttgtcccatgagtctgagtaaggaccccaagagctattcctgctctctctgtgacgtttaaagaaaagtttcgtcctgtgggaaggcttaaggctagagcttgagtttgttccttccaatgcccagacttcagggttgattccctccccaagcaggggacaacaaatgggtaacttgttccccatattcatgtagataatagctccagctttggctaatatatccctccctaataagggtgtgggactttcaggcataacaagaaaggcatgtgaaaggagcaaagtctcccaattacaactgaggaggtgggagaaatacctggttacagcctgtcccaggattcctcggatggtaacagaccttgaggacagctccaagacaggaaattaacactgagaaagccacgccagtgtccaggaggaagtcaatttcctggccctcaatggttatacatacccaggactcagtgagagtgatgacatgagctggtgctttccctgggcaccctcagtcttgttgcatcatctggttggtggcttctgtcccagagaacctttgtcctctggggcagtgtgtcttccagtgattgcctcggcatagtggacatgggcgagggggcagcttgtttctcataggacaatcttttttttaaaaagtgtccttgtaaaccacactgataacaagccctaccaggtgattggcctgctccattctctgtcccctctgaaccaccaaggtttgtttgtctgagggccatgactaagtctgcggcctttctattatctcacttttacttttgggcctgtccatcttggtccctattatagaacactgaggttgccaggtttaataatgcttccagagtttgttcagggcccagggctcgcttttggagctttctcctgatatccacagatgattgggtaataaacttgtcttttaggatcaattgaccctcaagtgagtcgggtgacaggggagtgtattttcttaaggcctcccgtagctgctcgtggaaggcagaagcattttcttcctttccctgagttatggtggacatcattgaataattcatgggctttttcctaatactccttagtccttctagaacacaagtcagcagatgtttacgactccagtccccatgatctgagtcgaggtcccagtggggatccatactgacttactgacatacggcttgctgactagtaaggaatttgtccctttcttcaactgtcattctatcatttactggactaagataccaggtatctccaaactcttgggctgcagctaaagccacattcttttcattaaaggccagggtttgatctaacactagcatgacatctctccaagtgagatagaaggtttgccctcgaccctgtaggacatctgtatacctatcaagatcatctgaaagcttcccaaggtctgccttgatctgcttaaaatcagagagggagaagggaacatgtacctaggttgggccaaattccgctccccctacagcttgaaggggacataaccgatagcccgggaagggggcgtttgtgatcctttggagatttctttgcttatttccttctgggcagcggacattagaggaggattatcattaataggaaggggagctatagggaggctaggatatggaggtaagctgagaggtcctcctgtgggatgtaaattgcaagctttgcatacttgggtattctccttcaatgaaaagaaaacttagacataaggtatttcactccatttgccttccctcttacagaaaaggtcaggctgcaggatagtactgtagtttatacttccctcaggtggccatttttccccatcagagagagaaattggggccaggctgtagtatagaaaaaaatgagccacctctttttcagggtttgtgggtcaaattggtcccagtggcttaggatgcatttcaagggtgagcctgttgatgcctgagtgtttcccatctgaaagacaaaaccgcctgtggttttggtttgtttgtttctccccctgcccaagaacctgcaacggtccctggaccctgctgatcggaatagttgtgctcaccaatgcagcagcagaaacacctcttgcccaagaacctgcaacagtccccggaccctgctgattggagtagttgtgctcaccaacgcagcagcagaaacaacccctgcccaagaacccgcaacagtccctggaccctgctgatcagaatggttgtgctcactgacacagcagcagaaacactagttctcctagaccacaaggaggaatgaggaaggtcagatttcgtggcccttaccaacacattctcgaaaacctgcgccctttcctgtcctcctagacctcaaagaggactgagaaaaatcagatttagtggcccttactgatgcattcttggaaaactgttggagtcctaagcattctcctgttagtattgggaccttacccatgtcctataaagatgttatgcccccaaaatgaagtggagggccataccctgagggagggaagggatctccagagttggaagagtgaagccttttatccccagttatatgaataggaaggatacaatttctgaggctcccgatatcctagtttcaggaatagcttttgttaggcctgcttttctgaggagggattctaaaattccagataatcccccctacgatggggctttgagcaaaaactgtgtctttctgattggtgagcccgggtgtctaaagaaggtaacagagtcctgaagtttatcctagaaatcattcttacaggagaaactagaaaagcaccagagatggagtggtttttagaagtgggactagcctcaaagaaaggcgagaggaagtttgtctgacaggcattaggacccaggaggcaagggtcaggatagataggatagatgggtgagtctcgcctgtgcgacgtgactttcagagttccattcatggctgcagggtcaaccaacttgttgtcgggaccccggagctgaatggctttcctcgctgtcgaccctcggctcagcccagaagtacaggaaaagcagaagctggttccaggcaaaccaacgctccccactccgaagagtcgggggttgttagccctttcccagaaagcctgacacccgtgtctttagttcagcagccacactagtcgcttttaactggccaacatgtccccatatttagctctcaaattctaaggaaaaataggacagaatagcaagcgaaaggggtccaaaggcactcaccgcttagtgataggtaatagtcccttcgtggtcaccaaaatgtgtccagaattggttccttctggtgggttcttggtttcgctgacttcaagaatgaagctgcagacccttgcggtgagtgttacagttcttaaagatggtgtgtctggagtttgttccttcagatattcagatgtgtccggagtttctttcgttgggttcgtggtctcactgactttaggagtgaagccacagacctttgcagtgagtgttacagctcttaaaggtggcatgtctggagttgtttgttcctcctggtgcgttcctggtctcgctggcttggagtgaagctgcagaccttcgcggtgagtgttacagctcataaaggtagtgtaaacccaaagagtgagcagcagcaagatttattgcgaagagcaaaagaacagagcttccacagcatggaaagggacccgagcgggttgctgctgctggcttgggtggccagcttttattcccttatttggccctgcccacatcctgctgattggtccattttacagagcgctgattggtccattttacagagtgctgagtggtccattttacacagtgctgattggtccgtttttacagagtgctaattggtgtatttacaaacctttagctagacacagagtgctgattggtgcgtttttacagagtactgattggtgcgtttacaaaccttgagctagacacagagtgctgattggtgcatttttacagagtgctgattggtgcatttacaaacctttagctagacagaaaagttctccaagtccccactcgacccaggaagtccagctggcttcacctctcactgggctgaagtgattctcgtctcagcttcccgggtagctgggcccacaggcacctgcaaccacgcttggctaattgttttattttttgtagagaccggatctcactatgttgctcagggaggtcttgaactcctggcctcaagcgaccgtccagcttcagcctcccaaagtcttggggattattggcataagctactgtgcctggccagtttcagtcttttaaaatttattggccagtacagtgactgatacctataatctcagcattttgggagaagaaggccagaggatcaattgagctcaagaactcaagacctgcctggactgtaacatactaagacctcatatctagaaaaaattttaaaacttagctgggcatggtggtacatgcctgtggttcctgttactgaggaagctgaggtgagaggatcccttgagcctgggaggttgaggctgcagtgagctatgatcacaccactgcacttcagcctggacaacagagtcaggccctttctcaaaaaaaaaaaaaaattattgagacttgttttatggccatgaatatgttctatcttggtgaatgttccctttgcacctaagaagaatatgtattctgctatttgttggtattttggtaaaaatgtaaaattaggttgagttgttcatagcatcttgcaggttttttttttttttttttttttttgaaacagagtcttgctctgtcacccaggctggaatgcagtggtctgatcttggctcactgaaacctctgcctcccaggttcaagcgattctccttcctcagtctcccaagcagctgggattacgggcgcctgccaccatgcctagctaatttttgtatttttagtagggacgggtttcactgggttggtcaggccaactcctgacctcaggtgatccacctgtctgggcctcccaaagtgctgggattacaggcgtgagccactgtgcctggccagtcttgcaagtcttctatatcatttccttgtttcatcaggtgctgagagaggaatgtggaaatcttcaactaataattgtggagttgtctttttcaccttttagttctatcagatttggcttcatgtattttgaagctcccatgtaaggtactgactgtatctacatttaggacttttaaaagttcatggattaactctttgatgattatgaaatatccttctttattcctggttataatctttattctgaaatctgaagtttactctgtttgatattaatatagcccctctgactttcttttgattcatgttagtatatttttctatccttttaaactatctgtgtctttattatttaaagtgtgtttctggctgggtgcagtggcttacacctataatcccaacactttgggaggccaaggagggctgatcacctgagttcaggagtttgagaccagcccagcaacatagcgaaaccccatctatattaaaaatacaaaaattatccaggtgtgcgggggtctgtcctgcagaccctgacccaatgatggatgaataacgtgcactgatacagatactctgctttgccagtctgactgagcatcagggctacttacagactcccaggagagtgctgtaaaaagttgcgacctgggccttgaccagccagccagactcatgtttattcagtaaagattaattgacaaaggcttgagtcaacaccattagagggtaattgaccttgcagacatcccagatagaaagcaattaagcacctgcggtagatccaaggttagtcttaggaccacatgagtaaacaagctagttagataaactccccacattcctttgtatctactttaatttatttaattaaaggtaagcggactaggctgccttcagccagatctgttaccgaagttatgcaactctcaggccttccaagagggtttctggctattataactaaattttttcccaccagcctgactgaaccctcacacaggtggagacaggagaattgcttgaacccaggaggcagcggtagcagtgagccaagatcatgccactgcactccagcctgggtgacagagcgagactccatctccaaaaagagaaaaaaaagtgtgtttcttgcaggcagcatatagtcttgctttttatccaatataaaaacttttgctttttagttggagtgtttatttaaatttgttattgtcaataaggttagattcatatctaccatcttactgctcattttttgttcccatctatttgtactgtttttcttatgactgttttatttccattattaacttattaactatgtctctttgtagttgctctaaaatttgcaatatacatttttcatttcgtttatagagttagaaccttgcagcaatatacttatttgttccctcctgtcctttatgctattgttgtcatacatttgacttttattataaactctacaatacactgtgattatttttgctttagaccatcaatttttttttttgagacagtgtttcactcttgttgcccaggttagagtgcagtggcatgatcttggctcactgcaacctccacctcctgggttcaagtgattctcctgcctcagcttccccagtagctgggattgtaggcatacgccaccacgcccagctgattttgtatttttaggagaaacgggttttctccgtgttggtcaggctgctgtcgaactcccaacctcaggtaatccgcacacctcggcctcccaaagtgctgggattacaggcatcagccaccacacccagcctagaccatcagtcttaatgagaaaaaatgtcttatgtttacctgcatatttactatttttttattgagatggagtttcattcttgttccccaggctgcagtgcaatggtgccatctcagctcaccacagcctctgccttctgggttcaagtgattctcctgcctcagcctcccaggtagctaggattacaggcatgcacccaccatggccagccaattttgtattttcagtagagatggggtttctccatgttggtcaggctggtcttgaactcctgacctcaggtgatccacctgcctcagcctcccaaaatgttgagatcacaggtgtgggccactgtgcccagccttttttttttttttttttttttttttttttttgagacggagtctcactctgtcacccaggctggagtgcagtggcatgatcttggctcactacaacctccgcctctctggttcaagtgattctcctgcctcagcctcccgagtagctgagattacaggcacccaccaccatgcccagctactttttgtacttttagtagagatgagttttcaccatgttggccaggctgatctcaaactcctgacctcaggtgatccacccagctgggcctcccaaagtgctgggatcacaggcatgagccaccatgcccagccacatatttactatttttagcactctttattcctttgtgtagctctaaatctatctctggtatccttctgcctaaagaagtttctctaatatttcttgtagtatagatcctgtgacaatgaatcctctaacttttgcttgcttgaaaataactattttgcctttgtttttgaaagatactttggctaggtataaaattctaggttgataggtttttttccttatgtacctaaaaatattgctcccttatttgctagtttgcataaatttcttaggagaggtctgttaccactcttgcaggtaactttttttttttttttagacagagtcttgctctgccgcccaggctggagtgcaatggcacgatcttggctcactgcaacctctgcctcccagattcaagcaattctcctgcctcagcctcctgagtagctgggattacaggcgcatgccaccatgcccagctaagttttgcatttttagtagagacggggtttcgccatgttggtcaggctggtctcgaactcctgaccttgtgatccgcctgccttggcctcccaaagtactgggattacaggcgtgagccaccatgcccagcctcttgcaggtaatattttttatttctttcatcatgttgatcttttcctttgtatctttacagcattgtttttaatgcccttttctgctaacttaatccttgctataatttctgggtctgtttctgttgacttattttttttctagttttggatgacgttttcccacttcatcatgtcttgcaatttttattgaatgttggatattgtgactttatgttgttgagtgctgaatcttgtcacattccttaaagagtattggactttgggccgggcatggtggttcacacctataatcccagcactttgggaggccaaggcgggtagatcacctgaggtcagaagttctagaccagcctggccaacatggtgaaaccccgtctcaagtaaaaatacaaaaattagctgggcatggtggcaggcacctgtaatcccagctacttggggggccaaggcagaagaatcggttgaacctgggaggcagagatgcagtgagccgagatcacgccatcgcactccagcctgggggacaagagcaagacttcatctcaaaaaaaaaaaaaaaaaaaaaagtattggaacttggctgggtgcagtgactcacgcctgtaactccagcactttgggaggccaaggtgggtggatcacgaggtcagcagttcaagaccagccttgccaacattgtgaaaccccatttctactaaaaataccaaaaaaattagccagtcatggtggtgggcgcctatagttctagctactctggaggctgaagcaggagaatcgcttgaacccaggaggcagaggttgcagtgagatgagatcacagcactgcactccagcctgggtgacagagcgagactctgtctcaaaaaaaaaaaagaaaaacaaaaagagagtattggacatttcctagcaagcagttaagtgattgcaaattaccttaattgtcttgaggtttaattttaaatgattttaagtgattttagcatgggcctatagtagcctttattctagagctaatttagctgcactttttttttttttttgagacatactttcactctgccacccaggctggagtgcagtggcgtggtcttggctcactgcaacctcctcctccctggttcaggtgattctcatgccttagcctcctgagtagctgggattgcaggcacatgccaccatgcctggctaatttttgtatttttagtagagtccgagtttcaccatgttggccaggttggtcttgaactcctgacctcaggtgatccacccacctctgcctcccaaagtgctgggattacaggcatgagccactgcacctggtcattagctgcacttctaaatgtatgaccctcataaggtctacttgagtgctgcttgtgttcaacatgatctctccactgtgattggaaggaattcgaataatccttggccccaggtgacctctgggagtttaatcttaaggctctcaggtaattgttctttcttcagaaatcattctctccttatgtatacaatggtgaataaagtaaaatactaataataggaaaaaaaagaggcatcattctttcctggtctcatgtggtttcaccttatgcatacatagataagtgttgagcaaagattcaagtgcaccctacacagatttctagagctctactctgtaggtctttcctctcaggtacagctttatccctggtttctctttccatggtttgagttaccctcagtcaaccaaggtctgaaaatattaagatatttggagagagagagagagaccacattcaccaacttttactacacgaattgttatcattgttctagtttattataagttattgttggctgagcacggtggctcatgcctgtaatcccaaccccttgggggccgaggcgggcagattacctgaggtcgggagttcgagaccagcctgaccaacaggaataaaccccgtctctactaaaaatacaaaattagccaggtgtagtggcaaatgcctgtaatcccagctactcgggaggctgagacaggaaaatcgcttgaacccaggaggtggagtttgcagtgagcagagatcacgccattgcactccagcctgggtaacaaaagcgaaactccatctcaaaatgataataataataagttattgttaatatcttactgggcctaattcatcaattaaattttatcataggtgtgtatgtgtaggaagagcatagtttgtataaggcttagcacttccttgatttcatgcgtccactagggatctgggaaagtattcctcttgcataaggggagactactgtatgctgcttcccaaattctgctgtatgggcttcccaaaattcaagctgtgtctcaagtcagtgaaaatcccaggctctgattagtctcttgctccttgggttgcagtctgggaattccctttaagcagtaaccctggccatggtaggactcacctcccattgtagcctcccaggtggctgtgattacaggcgtgagccactgcactcagcaggaaagcattgcattttgtacaatgctttactagtaagaagtaatcagtaagtgataaggtattgtaacctgtggtctggactcacctgaacaggttggattaagtgggttgatgcctgccatttaaccctttgtcttcgttgttatcactgaactcatacggttgccttggaaataacatagagagattgggtggtcctttgaggcccagggctctgttttttaaatgccattttggccacctgcagaatgattaggggactcactgaactcatagattgctggacaccataccagggccctgggaatgtgaaggcttcacagacttctcagtcaatgtttaagcatgtacgagcttgcaaacctttgacctacagtcatctaaagcagaaatcaattccaaatcccagggcttgggggcgagaatcagtttctcctaggtgtataagtggatatttagtaaaccaagtaaagaacaaccttatggccaggcgcggtggctcacacctgtaatcccagcactttgggaggccgaggtgggtggatcacgaggtcaggatttcaagaccagcctggccaagatggtgaaatgccatctctactaaagatacaaaaattaggccgggcgcggtggctcacgcctgtaatcccagcactttgagaggccgaggcgggtggatcacaaagtcaggagatcgagaccatcctggtgaacacggtgaaaccccgtctctactaaaaatacaaaaaattagccgggcgtggtggcaggcacctgtagtcccagctactcgggaggctgaggcaggagaatggcatgaacccaggaggcagagcttgcagtgagctgagatcacaccactgcagtccagcctgggagacagagcaagactccgtttcaaaaaaaaaaaaaagatacaaaaattagccacgatggtggcgggtgcctgtagttccagctacttgggaggctgaggcagagaattgcttgaacccgggaagtagaggttgcagtgagccaagattgcgctactgcactccagcctgggcgacagagagtactcggtcaaaaaaaaaaaaaaaatcacgactgtaatcccagcactttgggaggccgaggcgggtggatcatggggtcaggagatcgagaccatcctggctaacacagtgagaccccgtctctactgaaaatacaaaaaattagccgggtgtggtggtgggcgcctgtagtcccagttacttgggaggctgaggcaggagaatggcgtgaacccaggaggtggagcttgcagtgagccgagatcgggccactgcactccagcctgggtgacagagcgagactccgtctcaaaaaaaaaaaaaaagaacaacctttgaggttattccatatccattgaatcagctctttttatctaaatgtctatggaaagaaggctcaggaaggagaggaggttgtagaatgaagccactgaagttttccgggcaaatactgcctggctgaaaccctaccaagttattactctcttgactgtaggctgagtcatgccaggtgacttcctgaaagctgctgttgctcctgatgcttcaccgccgttgtaccatgtggcacacatcaccacatcacaaagcattttggttgctgaagtccccatagggcctaggagagctttgtggtgtccatcattatatcctcaggatctagccaagtacccatttcccagaggaatgaacaggcaccaaattctccatctactgtgatgagtttacccttcagagtctttcttctttcagcagggaccggaaccaccttaccctctctgcatctcccacctcttatgctgaacagctctcccaggtcaagcctcaggggtctgccctggtttatttactagttctgaggatcagtgtcctaataagcaacctcttaagaggatcaacccagctttcttcactgaatcttttcatgttgtctttgagggatctcacagggcgcattaatgaattcattttacacattcagttctaccttaggtactggtctgactgtctcaagtctcacattgtctatggcataaaccttaagaaaccctgcctttgtctttcacagtggtcatctccatcagaggcaactgaaagtttcttatcaaaagaaatttggttgccacccccacagttctacgaagtgagaagacttgcaaactttgcctctctctctgacttgcacaaattttgtttgggtcgtgcattagaaggactggaaaggtggctgccgatcatcttgttaactgctgatgggatggtccatcttttaccaggtaaaccagtgaagcatcggtgcttttgttagtattcacattcagtgccctgggctgcatggctgtattgcccaacgtagagacaggaattacagtctgtgttttgtaatctacagggtattagctaagtaagatcaaagcctataaaatatccatattattataaccagaaattctgcataatgtcatatacatacacatacatttatattaatatatttcctagacattgacaaaggtctttctcatataatttctcactttttttttttttttctgagacagtttccctctgtcacccaggctggagtgcagtggcacaatcttggctcactgcaacctccacctcccaggttcaagcaattctctgcctcagcctcccaagaagctgggattacaggtgcccaccactgtgcccggctaatctttgtattttttttttagtagatacggggtttcaccatcttggccaggctggtcttgaactcttgaccttgtgatccacccgccttggcctcccaaagtgctgggattacagtcatgagccaccatgcctggctgatttctcacttttttgcattttaagtttgaattacgagaactcgtaagttgtcatctaatttgaattagggagctttttttttgagacagagttttgctcttgtcacccaggctggagtgcaatctgggctcactgcaacctttgcctcctgggttcaagcgatacttctgcctcagcctcccgagtagctggaattacaggcatgtgccaccacgcctggctaatttttttgtattattagtagagacagggtttcaccatgttggccaggctggtcttgaactcctgacctcaggtgatccgcccgcctcagcctccccaaattctgggattataggcatgagccactgtgcccagccaactttgtttttttttttcagttggacataatttcaattgaaattatgaattatgaaattatgaagaaaataaagtaaaatgttaactctatctcaactgaaaatacaaaaaaaaaaaaaaaaaacaaattagccaggcatggtggcacacacctgtaatcccagctgctcaggaggctgaggcaggagaatcacttgaacccaggaggtagaggttgcagtgagccaagatcatgccactgcactctaacctgggcgacagagcgacactctctgtcaaaaacaaaacaaaacaaaaggctgggcgcggtggctcacacgtgtaatctcagcactttgggaggctgaggcgggtggatcacctaagggcgagagttcgagaccggcctgaccaacatggagaaatcccgtctctactaataatacaaaattagctgggcatgggggcgcatgcctataatcccagctacttgggaggctgaggcaggagaatcacttgaacccaggaggcagaggttgtggtgagctgagattgcgccattgcactccagcctgggcaacaagagcgaaactccatctcaaaaaaaaaaaagatttattactcaacctacagtgggaaaatttagcagttttgatggaatttctctaaattaacctgaagatgataagaacagcccactttgaaacatcaaaagtatatgaatatcaaggccaatcttaatatcagtattgaatagaataaagagagtcatgaactggtataatagttacagttcacagtggaaacataccagtcacagatgtttatgggcccaaagaaaactcttggctggggtgttgtaaggggatattaaaaacacaagaaagaggacaggcgcagtagttcacgcctgtaatcccagcactttgggaggccgaggtgggtgaatcatttgaggtcaggagtttgagaccagcctggtaaacatggcgaaacctgtctctactaacaatacaaaaattaaccaggcgtggtggcagacacctgtgatcccagttactcgggaggctgaggcatgagaattgcttgagcccaagaggtggaggttgcaatgagccgagatcgcgccactgcactctagcctgggcaacagagtgagactccatctcaaaaaacagataaaaaaacacaataaagaaattgaggtaagctcatagaattagattagttaacaactatctcagttccaaacatattaaatagatcaaaataaatactgatttaacaactatctcagttccaaacatatgaaatagataaaaatactgatttgtatttcattagtatattggagtgatttataaaataatactcgatggaattaaaattttatactttctgccatggtgaaaaataattttgtatttaaaaataaaatcagattttttcctttttcaggtgatgagctatatttagaagattcagactttttggaaaatcttatgtctactgaaaaaaagactgaggaaatcatgaaggaaggcaagcagtttcaccggatagtgacataccatcgccacctttatgatatccacgtgactgttcagccaaagtataaacacgtttatcctaagaactctgtagtaagaaaaagccatttgtagggtgcttaagcttgtttgtaaaatggcctacttgaagtcctcatgaataatgagggttgactttcatttgcttgaaacttaaggaagtttgtgcctataaaagttactgcaattcagtatttctttatttttttcgagacagagtctcaatctgtcgcccaggctggagtgcagtggcatgatataggctcactggaagctctgcctcaggggttcatgccattctcctgcctcagcctcccgagtagctgggactacaggcgcccgccaccatgcccagctaatttttttttgtatttttagtagagacgggttttcaccgtgttagccaggatggtctcaatctcttgacctcgtgatacgcccgccttggcctcccaaagtgctgggattacaggtgtgggccaccacacccagcctttttttttttttttttttttttttttgagacagagtgtctcactcttgcccagaacccaggctggagtgcagtggcccaatctcggctcactgcaacctccacctcccaggttccagcgattctcatgcctcagcctcctgagtagctgggactataggcatgcaccaccatgccccactaaattttgtatttttagtagaaacagagtttcaccatgttggccaggctggtctcgatctcctgacctcatgatctgcccgccttggcctcccaaagtgtgggattacaggcgtgagccactgtgcccagcatggtgtttcttatatcaggtgttttagggagctcgcttgcttattccattctttaatccttacagtgtgccacacgtataaagtttataacgtattaatgatctcattacccaaaaccagaacataatttcacaagggttcctacttctgtattgttttattatctcaaaaatttaaataacatgttctgctgtttattgttcttgttatccactgtattagcaccttccctgatgtgctttggaggttgatcaatgaatttctgagactttctgctggaattactttaagggtgtcttattagatgatgaaaagttggctgagacacccttcaagtgaccatgtcattgttttcttgctatgtctttagcttaatgattaagatacaattctttttaaaatcaaatggtattagttattatgtttcccaaattagaaatcgattttagttaacattttattttattttattctattttatttatttttgagacagagtctcgctctgttgcccaggctggagtacaatggcgcaatctcagctcactccaatctccgcctcccaggttcaagcgatttttctgcctcagcctcccgagtagctgggattacaggcacccactaccatgcccagctaatctttgtatttttagtagagacggggtttcaccatgttggccagtccggtctcgaacttctgacctgaggtgatctgcccaccttggcctcacaaagtgctgagattacaggcttgagccaccacgcctggcctagttagcattttaaagaaacacaaagccataacaaaaaccatcattgtttgtattccacactgttaatgaatgtaaagaggttagaaatgtagtgtttgattaatgatgtttatttttactgtatttaatatgagtaatttttcatcatctttcaagaggaataatgtttattgattaaaggtgagaaatgatagttaagacaccaattccatgtccagatctttgactgtatcatgcattgtacaattgatttcatattttatgaaatgccttaattttcctactataacataaagacaatgatgaataaagtttatgtgtatgattaaatccagattagagaactatatctagcacagcagtcctcagcctgggcacttttgccctagggaacatttggctatgtctggaaacatttttggttgttgaaactgtgggcagagtgggtgggtgggggagtatgctactaccatctagtagtagggagaggccagggatgcaactgaacagcctgcaatgcgcagtctcacccatagcaaagaattacctgaccaaggatgagacacccaatctaaagtaaaatctttttttttttaaataaatggttccaatatgtaaattttgagaaccacagatactattattctgtctgccttttgaatctacaaaaatgggaaattacgtccaattggaaaaaaaaaaaaagttggctgggctgggcgcagtggcttatgcctataatcccagcattttgggaggctgaggtgggcggatcacctgaggtcaggagttcaagaccaggctggttaatgtggtgaaaccccatctactaacaatacacaaaaattagccaggcatggtggcctgtaattccagctactcaggaggctgaggcaggagaatcgcttgaacctggaggtggaggttgcagtgagcccagattgcactccagcctgggtgacaagaggaaaactgtctcaaaaaaacaaaaacaaaaacaaagtgtacaaaaatttttgttgtcttttgatttttttgagatagagtctcactttgctgcccaggctggagtgcagtggtgcaatctcagttcactgcaaccttcacctcctgcgttcaagcaattcttgtgcctcagcctcccaagtagctgtgactataggcgcccgccaccacacccagctaatgtttatatttttagtagagacaaagtttcaccatgttggccaggttggtcttgaactcctgacctcaggtgatctgcccgcctcagcctcccaaggtgcccgggattataggcatgagccaccatgcccagcctagctttgtcttttgactctcaaagattactagaatgttgccgctggaagggacctcattgaacaccatgattttgccagtgagaaaaccgagacacgcagctggttagtgccacagtcaactccctcttcactggagttgccatggctcagtgggtgatattagaagatgtcatgataaagtaatatgaccagtttttcttcatagaaaagatcgttttcacaccacgtttccctcatgtatgcttttttttgtttttgtttgtttgtttgtttgtttgtttgttttgagatggagtctcacattgttgtccaggctggagtgcagtggcgtgcttttggctcactgcaacctctgcctcctgggttcaagcaattctcctgcctcagcctcccgagtagctgggattacaggcacgtgccactgcacctggctaatggttgtatttttagcagagacagggcttcaccgtgttggccaggctggtcttgaacttctgacctcaagtggtccatccacgtcatgctggcaatacaggtgtgagccactgcgcctggcctgtatgttgttgtttttaatctgagtgaaccttgtctccttccaagaattccttttgggagacttgtcacatgacttcctacctatagtgatatcttgcccataccccataaccccaaataatatgagctgaaaaattaagttttagaattcagattactggtgttcatggcatttatgacacacagtttttcttttcttttctttttgagacaccttctcgctttgttgcccaggctagagtgcggtggtgcgatcttggctcactgcaacctctgcctcctgggttcaagtgattctcctgcctcagcctcccaatttgctgggattacaggcatcaaccaccacacccagctaatttttgtacttttagtagagacagggtttcaccatttgaccaggctggtctccaactcctgacctcaagtgatctgcccgcctcagcctcccaaagtgctgggattacagatgtgagcccctgtgctgggtcagaaatatttttaaagttaaaaacaaaattcggctgggcatggtggctcacacttgtcatcccaacactttgggaggccaaggtggaagaatcgtttgagcccaggagttcaagacctgcctgggcaacatagggagaccatgtctctataaaaaaattcaaaattagctgggtgggccaggcacggtggttcacgcctgtaatctcagcactttgggaggctgaagtgggtggatcacaaggtcaggtgttttgagaccagcctggtcaatatggtaaaaccccgtctctactaaaaatacaaaaattagctgggtgtggtgacacatggctgtagtcccagctacttgggaggctgaggcagaagaattgcttgaacccaggaggcggaggttgcagtgagctgagatcgtgccactgcactccagcctgagtgacagagcaagactgtctcaaaaaaaaaaaaaaaaattagctgggtgtagtggtgcatccctatagttttatcttctcaggaggctgaggtgggaagatacttgagcccaggagatagaggctgcagtgagcagcgataagattgcgccactgtactccagcctgggcaacagagcgagaccctgtctcaaaaaaaaaaaaaaaaagcaccatgagacagggtgaagaaaaaggaagccttgtgaatctttaaaaaagtgttttccgctagcaccagagttggaggagggcaggttacagtacaaatgcggaccccttttaaccttggggagactgggtggctggacccccagggcagtgagtgtcttgactatgggagtgtaatatataaatatttccattttctgtgagccatgttgtaaaaagattgggaaataccgtactgtagcacaggatctagtcaaacaaaaaagtgtctccccacaccaagaactgggagaagtctatattacccatttttgtggattgggaactgttttgggacttcctatttaagatggggttttgctatgttgccaaggctgggctccaacttctggctcaagggatcctcccatctcaccctcccaagtagctgagactacaggcacatgtcactgcacctggctacaagacctcctgtttattttattttattttatatattttttgagacagagttttgctctgttgcctaggctggagtgcagtggcatgatctcagctcactgcaacctctgcctccttggttcaagcgattctcctgcctcagcctcctgtgtagctggaattacaggtgcttgtcactatgcccggctaatttttgtatatttagtagagacagggcttcaccatattagccaggctggtctcgaactcctgacgtcaagtggtccacccacctcggcctcccaaagtgctgggattacaggcctgagccacctcgcccagccaggacctcctgtttaaatcagatcctgtcattttccatctctttttggcaaggtcttgagctttcaggtgagttggccataccaggtgccttgattggaggggaggccttgtcaacctaatttcaggaacaggtgaacatcacgcactttgcagctgtgtttttctcccgactggcagctacacacctttcctctgcaaccatcctgcctgagagtttaagtgcatgttatctgtgggacctcgtgcaatccagttttcttatagaactgcatgcttatgtgagcattctgttccccaaataataactccacagtttccatgctctctccaaactcttgcagtcttttgtcatcttgttggttcccttactagcaaattaactcgtttagactcggagagccctgccagttgaagtccagctgggaagaaatccaggaccaggaacctttccaaaaggtgcagatcaaatggaaatgttgccaggaggccacgaagacccagggattcatgactgtccaggactcttcctcaccaccaaggcttccagctcacagcgtttaaggggtgtaggctggcctagagaaagcaggaggacaggggccccttagcaggcaacaaggaccaactgagggcctggtgtggtggttcatgcctgtaatcctagctgctcagggggctgaggcggaaggatggcttgagcccaggagttcaacaccagcctgggcaacacagcgagacccccatctctacaaaaaaattaaaaaattatccaggcgtggtggtgcatgcctgtagtcccagctacttgagaggctgaagatggaggatcaactgagcccaggaattcaaggctgcagtgagccatgattgtgccactgcactccagcttgggcaagagagccatatcctgtctctttaaaaataaaataatgaacttgtaaccacctaatgggttcaccttgcccgctgcctagacagagccaatttatcaagacagggaattgcaatggagaaagagtaattcacgcagagccggctgtgtgggagactggagttttattattactcaaatcagtctctccgagcatttgaggaacagagtttttaaagacaattgggcgggtaggagcttgggaagtggggagtgctgattggccaggttgaagatggaatcagaggttgttggagtttttcttgctatttactcttcctggttggtttggcagaactggttgaggcagattatcggtgtgggtggtgtcagctgatccactgagctgattcaaggattgttgtctcatgcctccctaaaatgtaaaagaccaagtgaggcaggaaaatagggtctggaggtagggaacataaggccgattcacgcttcagctataaggggaaataccctctccatagggcatacaccgagtaaatgacttcgtaactttacttcaccgtcttcatttacatcgggcgtaccccaagcagaaggtatttaaattcacagaaattctgccgggcctttgagtccctgtgttcaggcctgctcccacactgtggagtgtactttttcaataaaacccttcattccttccttgctttgtgtgtgccttttgtcaaattctttcttcaagacaccaagaacctggacaccctccaactttaacacaagctgtgcctcgaccacgtctagcaaatgtcgttaggacttcctgtgtcaggggcgcctgtcctcaaccttggcaaaattttttgttttgttttgttttttgagacagagtctcactctgtcgcccaggctggggtgcagtggcctgatctcagctcactgaaacctctgcctcccgggttcaagcgattctcctgtctcagcctcccaagtagctgggattagaggcgctccccaccatgccaggctaatttttctatttttagtagagacggggtttcaccatgtcgaggatgctagtctccaactcctaaccttatcaggtgatccgcacccctcgcctcccaaagcgctgggattacaggcctgagccacctcgctctgctggccaaataaactttctaaatgaactgagacctatctcacattttcaggattcacaggctcttatcaattttgtttcagagtcaaaccatggactgaattccttcccaaggttagttgggcttccgcccaggaataaacaaggacagcttaaaggttagaggcaagatggagttgattaggtctgatttctttcaccatcacaatttcctcagttacaattttgcaaaggtggtttccaacggactcagccgcacgcggcccctctgtccctccgggggacaggcgagtgtccctggggcctgcagggcagtcctgctggctgcaaaagagagaatcacgcgacccctagccgggcctcccagggcctccgcgcgtcagtcctcctggccaccgcgtggcgctgtgccttacgttgttgggccgttgggtggaccacgtggtctccgacgcctcaaggcctgctcagcgtgcgcgggcatccggtgggtgcgggaggcccgaggccaggcaggcagggatcccgcagcgaggggctggttactgccaggacggagcgcattgcctcgagccgaccccggggtccgcgagggctcctggggacgaggagtgtggggcacctgccgcggggggcccaggcgctaaaggtggagggaaggaacgcactcgcggcgggggcctggccggggcggacgcagccagcctcacccgcgacggtaggggacttccagggcgagggggcccatctgccctcgggcgccaggaggatgctccagctcctggtgctgaaggtgagcgccgccaagccagacccacgccagacccacgcagtcccccacccccaccccagccgcgcacagcctcccacccccaccccagctccgcacagcttcctacacccaccgcagccccgcacagcctcccacccccgaccccaaccctacacagcccccacccctccccccatcccagcctccacatccctccacacccactcctcccagcccacgcatcccccccatgtccactccctctcagcccacacctactccccacgcccactcctcccccaacccacacatcctcccacacccactcccacccagctccacccccacactcacacatgcccccaccccatctcactgctgcacactccatcccactcccacacatcccaaccccgtatatcccatgccgccacaccacgcccccactcccaccccactcccaccccaacccatcccactcccaaccccacacacccccaactcctaccctagccccagctcccacccgtttccttatcgctgcccaccccacagtcacaccctcgcccctgtccccaccccatccttattcccaccgcccccactcacacctccaccccaacatttcatccccccacactcagccccacacaccccaccaccaccccatctccactcccacctgcaccccagccgcagcccaccccacctccactccaaccccaccccgccctcccccacctgaaccctccctgcgcccccaccagggggcaccccgggctgggagctggggtagaacccggatgagcccgggtttcacgggccctggcgtgctccgggatgcacctggaggagcgcggaattggttgctcctccgaatgctcgatcacccgggccaagcgacactggcgtccccagggccccgctctccgtactccacggggcccttaggctcggcgcctggacagggtcgggtggcccgggcagccccagcccatgggtccgggcttccctcatgcccccagtctctgttgccctatccgctcaccgcgtgggctctgcgtgggcgttgttctagtcctcggggaagggacgcccgcctggacccttgcttttcccccttggagtccagtgagggctcattggtgaaggggaaagcgttgctggaggaaggagttgacaggccagagcagaggggtgggtatgggttattggagaaaggaaatctaaatactttgaaaatcacacttcagtgggcccaggagctggacgtagcagattgtgggattgttttattttattttattatttattcatttatttttttgagatggagtttcgctcttgttgtctaggctggagtgcagtggtgtgacctcagctcactgcaacctccgcttcccgggttcaagtgattctcctgcctcagcctcccgagtagctgggattacaggtgcctgccaccacacctggctaatttttgtatttttagtagagacagggtttcaccacgtggctgttctcgaactcctgacctcaggtgatccacctgcctccgcctcccaaagtgctgggattacaggcgtgagccaccgtgcctggcctattttattttattttattttattttattttattttattttattttgagaaggagtcttgctcagtcacccaggctggagtgcagtggcgcgatctcagctcgctgcaagctccgcctcccgggttcacgccattctcctgcctcagcctcccaagtagctgggactacaggcggccaccaccacgcctggctaatttttttttttttttgtatttttagtagagacggggtttcaccatgttagccaggatggtctccatttcctgacctcgtgatccacccgcctcggcttcccaaagtgctgggattacaggcgtgagccaccacgcccggccggtgcgatttttaaaaccagcactctcctgctcttacttgatgtcttgtgtaatctctctgaacaaagattcacaaatgtttgaggaagctgactcttacagagaatttgccctcagacttttaggtgttcagatccaccaggcgagctcctctcctccagtcagatgttgtctgtcagtcctaacgatgctagtccgatttcttctttagaagagacagggctcttccagggctacacatcctgaaacatgcacaaccatcccggcagaactttgatagcaggagctggacttgctgcctcctgttcgcgaacccctttcctctcagttgggcccaggaactctttcatttacctgctcaactctgatctgcccccacttctggccctcaaccagctcaccccctgagcaaattctgtcctgaataggagtgtctccccaagtgctgtgtaggtaccacctgtcctgcagatgaagttagcttttacaaggatgaaatatttttccctccatgtatccatcaacagatgactgggtaaacggaaggtggtttgtacatacacaatggcatattatttagccttaaatatctgagaaatctttgtctgactcacagtcacaaagatttttttcccccatgtatccttttattatttaaaaaaaattttttttttttttttttgagacggcgtctcgctctgttgcccaggctggagtgtggtggagcaatctcggctcactgcaacctccgcctcccgagttcaagcgattctcctgcctcagcctcctgagtagctgggattacaggcgcgtgccaccacagccggctaatttttatatttttggtagagacggggtttcagcatcttgtccaggctggtctgcaactcctgacctcaagtgatctgccctcctcggcctcccaaactgctgggattacaggcaagaactgctgcacctggcccccccatgtaaccttttagaagttttataattttatattttacatttagatatatgatccgagttaatttttgtatatggtgcaaggaatggatgaagtttcatttctttgcacgtgattatctaactgttccaacatcatttgttgaaatgactatccgtcctcctttgtgtcttatcaaaaatcaattgactatatgtgtgattatattcctgttatattgatttatgcacaataccacactgtcttattactgtagctttataggtaactattttgttttttttttgagacggagtcttgctctgtcccccaggctggagtgcagtggtgtgatctcggcacagtgcaagctctgcctcccgggttcatgccattctcctgcctcagcctcccaagtagctgggactacaggtgcccgccaccatgcccggctaatttttttatttttagtagagacagggtttcactgtgttagccaggatggtctcgatctcctgacctcgtggtccacccatctcggcctcccaaagtgctgggattacaagcatgagccaccgtgcctggccctttatagataactcttgaagtcaggtgatatgagtcttccaactatattctttttcagaattgttctagttccttagcttttgtaatatgcattttgtaattgcttgctgagtctaccaaaaaaaaaaaaaaaaccatgctggaatggagttgtatttatagatgggttcagagaaatatatattaatacagtatatctatacttatttagatctttcatttctttccgtcagtgttttataactttcagcataggaattttgcacatatttttaagatttagacctttaagtaattactgggttttgttttgtttttcagtaaaagacacagggtcttgctttgttggccaggctggagcgcagtgctgtaatcacaacttactgcaacctcaaactcctgggctcaagggagcctcctgccccagcctcctgagtagctgggcctaaaggcatttgcccccactcctggttaattaaaaaaaatttttttagagacagggtctcactgtgttgcccaggctggtttctcaaactcctgggctcaagcaatcgtcccacctcagcctcccaaagtaatgggattatgggaatgagccaccactcccagcctttttgtaattttaaatttccaatttccatttctggaatatagtaatacgattgaattattattttttaatttaattttaagttccaggatacaagtgcaggacctgcaggtttgttacatagatagacatgtgccatgttggtttgctgcaactattaacccatcatctagttattaagccccgcatgtattagtttttttatcctgatactctccctcccctctgtcccataggccccagtgtgtggttcccctccctgtgtccatgtgttctcattgttcagctcctgtttataagtgagaacatacggtgtttggttttctgttccagtgttagtttgctgaggataatggcttccagcttcatccatgtccctgcaaaggatattatcttgttactttttatggttacctagtattccatggtgtatatgtaccaaattttctttatccagtctatcactgatgggcatttgggttgattccatgtctttgctattgtgactagtgctacagtgaacatacgcatgtatgtctttataacagaatgattgatattccttttggtatatacccagtaatgggattgctgggtttttctggttctagatctttgaggaatcaccacactgtcttccacaatggttgaattaatttatactcccaccaacagtataaaagcattcccatttctccacagccttgccagccatctgttgtttcttgactttttaataattgccattctgactggcatgagatggtatctcattgtggttttgatttgcatttctctaatgatcagtgatgttgagctttttttcatatgtttgttggctgcataaatgtcttcttttgagaagtgtctgttcatgcgctttgcctactttttgatggggtttttttcttgtaaatttgtttcagttccttacagattctggatattagatctttgtcagatggaaagattgcaaaaattttctcccattctgtaggttttctgttaactctgatgatagtttcttctgctgtgcagaagctctttagtttaattcaatcccatttgtcaatttttacttttgttgcaattgcttttgatgtttttgtcatgaaatcgttgccgttgcctatgtgttgaatggtattgcctagatttttttctagggttttttttttatagttttaggttttacatttaagtctttaatctatattgagttaatttttgtataaggtgtaaggaaagggtccagtttcagttttctgcatacggctagccagttttcccagcaccatttattaaatagggcatcctttccccattgcctgtttttgtcaggtttgtcaaaaatcagatggttgtagatgtgtggtcttatttctgagatctctattctgttacattggtctatgtgtctgtttttgtaccagtaccatgctgttttggttactgtagccttgtagtatagtttgaagttgggtagcatgatgcctccagctttattctttttgcttaggagtgtcgtggctatatggactcttttttggttccctatcaattttaaagtagttttttctatttctgtgaagaatgtcaatggtagtttaatggaaatagcattgaatctataaattactttggacagtacggccattttcacgatgctcttcctatccgcgagcatggaatgtttttccatttgtttgtgtcctcttttatttcctttgttagttgtattcctaggtattctctttgtagcaacaattgaattatttcaataatcttgtgccttgtagccttgtaaagtcaattattagttctggcatatattatatattttttattgtaaaaaacatgtaacgaagtttgccatctcaaccatttttaagtgtacagttcatggtattaaatacattcataatttttttttttttttgagacggagtcttgctctgtcgcccaggccggaatgcagtggtgcgatctcagctcactgcaagctctgcctcctgggttcacgccattctcctgcctcagcctcccaagtagctgggactacaggctcccaccaccacgcctggctaattttttgtatttttagtagagactgggtttcactgtgttagccacgatggtcttgatctcctgaccttggatccacccgcctcagcctcccaaagtgctgggattacaggcgtgaaccaccacacccagtcaaatacattcataatgttgtgcaaccatcaccaatgtccctctccagaagtctttttccttttgcaaaactgaaactctgctttctctatgaatttgactactctgagtgcctcatataagtggaatcatacagtttatccttttgtgactggcttatttcactcagtataatgtcctcagggttcattatgttgtaccatgtgtcagaatttcctttcttttgaagcccagtgcagtgatgtgaacgtgaggacccaactacttgggaggctgaggtgggaggattgcttgaggtgaggattgcttgaggtgaggattgcttgaggtgaggtgggcaatatagcaagaccctgtctcttaaaaaaacaaatatatgtctttttttaaaaaaagaatttccttccttgttcagactgaataatagtccattctgtaccacattttgcttatccatttatctgttgagggacactgggttgcttccacattttagctattgtgaataatgctgctatgaacacaggtgtgtacgtatctcttcaagatctttcaattctcgtggatctacacccaatagtggaattgctgcattatatggtaattatagttttaattttttgaggagccaccctaccattttccacagcagctatgccgttttacattcataccaacagtgcacaatgattccagtgtctccacagccttgccaacacattattttctgttttaacacaccttccagcacactgaattttcaggttttttttgacagtagttatcctcatgagtgtcaggtagtatctcactatggttatgatttatatttctctaatgattagtatgttgagcgccttttcatgtacttattggccatttgtatatcttctttggagaaatgtctattcaaatcctttgcccattttttaattggtggtttgggtttttgtattgttttaggagttctctgtatattctgggtattaatcccttatgagatataagccttgcaaatattttcccccattccataagttgactttctactgtggtgatagtgacttttgatgcacacagtttttaaatttcaatgaagcccagtttgtctattttttcttttgttgcctgtggctttggtgtcatatccaagaaatttttgtcaaatccaacgtcacaaagcatttgctctgtgttttcttttgtagttttaggccttccatttaggtctttgatccattttgagtatggtgtcacataaaggtccaaatttattctttcatttttatttttatttttattttctttttgagacagagtctcactctgttacccaggccggagtgcagtggtgcaatttcggctcactgcaacctccacctcccaggttcaagtgattctcttggcgtagcctcctgagtagctgggattacgggcatgtaccaccacacccggctaattttgtatttttagtagagacgggatttcaccatgttggccaggcttgtgtcgaactcctgacctcaggtgatctgcctgctttggccttccgaagtgctgggattacaggtgtgagccattttgtctggcctccaagttcattcttttgcatgtgaatatccagttttcccagtgctcatttgttacaaaacctttccctgaatggttttggtacccttgtcaaaaatcatttgactagaccacaagggtttattctggactctctattctactctgttggtctatatgtctgtctttatttcagtaccatactgttttgattactgtagctttgtagtaaagttttgtgatcaagtgtgagtcctccagctttgttcttttttgatattgttttggctattttgggtcccttgggatttcatgtgaattttagaatgtgcttttctatttctgaaaaaatatcattgtggattttggtagggattgaattgaatgtgtagattgctttgagtaggattgacatcttaatgatattaaatcttccagtcaatgaatgtgggatgtctttccatttatttatgtcttctttaatttctttcagcagcgttttataattttcattgtagttctaattttttaatagactccttaaggttctctgtgtagacaattgtgttctttatgaataaagacaattttatttattcctttctaatcttcctgacagtctttttcctgtcttactgtactaactgggacctttagtacaatgttagcgagtataccccttgtgaaatttttcttttcctttttttttttttttttgtgacagagtctcactcttgttgcccaagctggagtgcagtggcgcgatcttggttcactgcaagctccgcctcctgggttcactccattcttctgcctcagccccctgagtagctgggactacaggtgcccaccaccacacctggctattttttttttttttttttgtacagatggggtttcaccatgttagccaggatggtttcgatctcctaaccttgtgatccgcccgtctcggcctcccaaagtgctgggattacaggcataagccaccgtgcctggcctaaatttttatttttcatttatgaaatttacgttttccacagcttgtgtgtgtgtatctatatctatacatgtataaatagatacatatctatatacatatagagtttccatttcttaagtgagattcttttgttttcaactcactctaaccatctcatctttaagttctgtatttataatagctgtttttaagtcctcgcctgttaattccaatatctgggtatcttgggttcactttctggtgactgctttttctttttcttttttttttttgttttttttttttgtgagatggagtcttgctctgtcgcccaggctggagtgcagtggcgcaatctcggctcactgcaagctccaccacccggtttcacaccattctcctgcctcagcctcccgagtagctgggactacgggtatctgccaccacgcccagctaattttttgtatttttagtagagacggagtttcatcgtgttagctaggatggtctcgatctcctgacctcgtgatccgcccgtctcggcctcccaaagtgctgggattacaggcatgagccaccgtgcctggcctaaatttttatttttcatttatgaaatttacgttttccacagcttgtgtgtgtgtatctatatctatacatgtataaatagatacatatctatatacatatagagtttccatttcttaagtgagattcttttgttttcaactcactctaaccatctcatctttaagttctgtatttataatagctgtttttaagtcctcgcctgttaattccaatatctgggtatcttgggttcactttctggtgactactttttctttttcttttttttttttttttttttttttttttgtgagatggagtcttgctctgtcgcccaggctggagtgcagtggcgcaatctcggctcactgcaagctccaccacccggtttcacaccattctcctgcctcagcctcccgagtagctgggactacaggtatctgccaccacgcccagctaattttttgtatttttagtagagacggagtttcatcgtgttagctaggatggtctcgatctcctgacctcgtgatccgcccacctcggcctcccaaagtgctgggattacaggtgtgagccacagcacccggctaaaactgcgtatttctttcagccttcccaccattggtcttctctggactccttggggtctcatttctgccaagaatgtgacaggtgttcttatgcagactttagggctccccctctgtggctctccgtttaggaattttaccctttaattctcaagctgctatggcagccccaaactctgttctctgattcctcaagccacaaacatgactttctccttgaattgcagctggttaacaccacgtggactggggaatgggctcaggggaaaagccgtgtaaaagtggatctcacccagggaagtttccttctttcaagggttgaatctccttcaggttctgcttgcttttggtagctcttcactgccttcaaatagtcatttttgtattttttccagggtttattattgttacccacaggtgatatagaaactattctattgtcactggaaccagaataactactgttcttttttctgatcatttgttataaaaatgttcaaaccttcagaaaagtagaaataatactagtgggaatacctgtattcttgccaccttgggcaaagatgtcatttttgcccaaatcttgagatgtcattttttctaggcagagttaggtaatacttttgaaaaatcatgagttcttggctgggcgcggtggctcacgcctgtaatcccagcactttgggaggctgagatgggcgaatcacctgaagtcaggagttcaagaccagcctggccaacatgatgaaatcctgtctctactaaaaatacaaaattaactgagcattgtggcgcacgcttgtaatcccggctactcaggagacttaggcaggagaattgcttgaacccaggaggtggaggttgcagtgagctgagattgcgccactgcactccaacctgggtgacacagcgagaccttttggtattttcaatccaaatttaacttttcactttatatttgtgtctttaacaatgaaaatcttggcttctaataacaatagtacataacaaaatacattccaggaagtctgactttcttccgtgtcccttctccatttctctcctccccttagaccatgatttgcatttactttggtttatctgccattattattttttttattatgagcagaatgtacttatattcacattgctttctctttcttacaaaagaagaatacaaatcaggcacagtggcttatgtctgtaatcctagcacttagggaggccgaagtgggaaaattgctcgagccccggagtttgagactagcctgggcaaaatagcgagacaccatctctattttttttttaattaaaaaaattttttttaacaaacaaaagtactaaaaacattgctctgaaccttgtgtttgtatattactatggatttttcagaatatgggagattgaggacatccgttcgttatttgagtcacaacacataattgagaattacatactgttggttatgtgttttagaattttatcttcggtctaaccatttaagcaaaggcatttgtcaagaatttgttaggtcacttaaattagaaacagtaatcgtggctctaaagtttattttgtggtactacttttaaatcatacgctgttctgtttgtcttttaaaaaatttacagattgaagatccaggttgcttctgggttattataaaagggtgtagtccctttttagatcatgatgtcgattatcaaaaattaaatagtgccatgaatgacttctacaacagcacgtgtcaagatatagaaataaaacccttaacattggaagaaggacaggtatgtatctaaatgttctttaatcactgtgtattgaaacaccactcaaaatataaactattttggcaacgatgatgattcaagcttttagagtattttagtttcttacactcagtgccttgtgttaggtttttttttgagatggagtctcgctctgtcacataggctggagtacagtggcaccatctgggctcaccgcaacctccgtgtctcgggttcaagcacttcttctgtctcagcctcctgagtagctggaattacaggcatgggccaccacactcagctaatttttgtatttttagtagagacgggggtttcaccgtgttggccaggctggtctcgaactccagacctcaggtgatccacccgcctcagattcccaaagtgctgggattacaggtgtgagccactgtgcccagccagtgtaaggttctttaggttgcacaagattcaggctagtcatggaagggggtggccgccatgtaaggtccatgtggggcaaaagtagacagaatgtcatctacacccaggcattagggccatccctctggggctgggaaccagggggttatttgagatcccacagaggtgtagggatctcagcaaagagggaatagggtcttcagtgtagggccaacgcctcccttttggttgcatgactttggccaactcagatgtctttgttctccttactccacgccgtggcccctccttgccttcttgcagactcagctctcactgccccttgtcatggttgccacagctcagctacttttcagaagagagtgaatttttgtaatggtataataggaaaaggtttataaactctttatgagaaaaagcagaaataatttgaatccacttcccccaaatcatcattaataacataatttattttagtatatgtgctgccgaagcaagcacaataacataatttgtttccacgccattgactaattgaagaagttaaaccaggtcaattgtttttaaaaatattccacattttgggttgggcatgctggctcttgcctgtaatcccagcactttgggaggccaaggaaagaagattgcttgagcctaggagttttgtgaacagcctgggcaacatagtaagaccctgtctctacaaaagataaaaagattagtgggcatggtagcacgtgcctgtggccccagctactctggaggctaaggcagaagatcacttgagcctgggaggtaatagctgcagtaagctgtgtttgcgccactgcactctagcctgggcgagacagcgagactgtctcttaaaaaaaatatgcgtagccgggcgtggtggcccacgcctgtaatcccagcactttgggagtctgaggcaggtggatcacctgaggtcaggagttcgagaccagcctggccaacatagtgaaaccccatctctactaaaaatacaaaaaattagctgggcgtggtggcaggcacctgtaatcccagctactagagaggctgaggcaagagaatcacttgaacctgggaggcggaggcttcagtgagccgagatcacgccattgcactccagcctaggcaacaagagtgaaactctgtctcaaaaaaaaaaaaaatgtatatgtgtgtgtgtatgtgtatagttaaatataaagctttgggtagatttaaggttgcttctgtttttcaagaataggtgtactgtgaacttcatgtgaacttcatgttgaattgagagatgatgttttcagtgatgctgagattgaccagaggggacatcctgaccctccttgtggccttacctgtcagcattcatgtgatggcttctccattcagtgaccactgctgcctgaatcagctcttttattcaggcactcgatgtggggttttctctcattccttctgcattcatcagctggaattcttctgttatagaactttccctgatctcttaagactgtttgattaccctgaaataacactgttccttttttaaatttttttaatttatttttttaattaattaattttttttttttttgagacagagtcttgttctgttgcccaggctagagtacagtggcgccatctctgctcactggaagccccacctcccgggttcacgccgttctcccgccttagcctcccgagtagctgggactacaggcacctgccaccatgcccggctaatttcgtttttgtatttttagtagagatgggatttcaccctggtagccaggatggtcttgatctcctgacttcatgatccacccgtctcagcctcccaaagtgctgggattacaggcgtgagccaccgcgcctggcctttttaaaaattttttaaatcagaaggcctatgaatgcaaataatacagttcatactgcaaagaaagagaaattgtgtggatcagttttcaacttagtgctttgtgcctagttatcacatttttggtgtcgagagggtggttttgtttttctctcctcctcctccttttcttttcttttcttttttttttttgaagatgggggtctcactctgtcacccaggctggagtgcagtgactctatctcggctcactgcaacctccgccttttggtatcgagcaatcctcccacctcagcctcccaagtggctaggactaaaggcatgcaccaccacacctggctaatttttttgtattttttgtggtgacagggtttcgccatgttgcccaggctggtcacgaactcctgggctcaagagatctgcccgccttggcctcccaaaacgctgggattacaggcatgaatcactgcgcctggccctttacacttttaagtacaaacagacctcattttattgtgaattcgcagtaactatgtttttttacaaattgaaggtttatggcaacccttcatggagcaagactataggcaccatttttcccacagcaggtcctcacttcatgtctctgtgtcacatcttggtaattctcccagtgtttcgaacttttttgttattattctatctgttatagtgatctgtggccagtgatctttgaggttagtattttaattgttttggggtgccacgaattgcacccatgtaagatagtgaattttatcaataaatgtgtgttctgactgctccaccatctctctccctctccccaggccttcctgttcactgacacacaattgaaattaggccaattaataaccctacaatggcccctaagtgttcaagtgaaaggatgaatcacattaaattaaaagctagaaatgattgaacttagaggaagacattttgaaagctgagataggctgaaagctaggcctcttgcaccaaacagttagcaaagttgtgaatgcaaaggaaaagttcttgaaggaaattaaaagtgccactctggagaacacacaaatgaaaaaaaaaatgaaaaaagaagcagccttattggtaatatggagaaagttttattggtcaggatagaggcttagaaccagttactacattcccttcagccaaagcctgatccagagcaaggccctaactctcttcaattgtataaaggctgagcaaggttaggaagctgcagggaaaaaatgtgaagctagcggaggttggttcatgaggtttaagaaaagaggccatctccacaacataaagtgcaaggtgaagcacaagggctgatggagaggctgcagcagtttctccagatgtagctatgatcattgttgaaagtggacacactaaataagaggttttcaatgtatacaagacagccttctattggagaagatgtcttctaggacttccagagctaaataggagaagtcagccaggtgtggtggctcacacctgtaatcccagcactctgggaggctgaggtgggtggatcacctaaggtcaggagttcgagaccagcctggccaacatggtgaaaccctgtctctactaaaaatacaaaaattagccaggtgtggtggcggacacctgtaatcccagctactggggaggctgaggcaggagaattgcttgaacccgggaggtggaggctgcagtgagctgagatggcaccactgcactccagcctgggtgacagagagagactccatcttaaaaaataaataggagaagtcggtgtctttaaaggactaaagctttaaaggtcagagtggctttctttttaggggctaatgcagctggtgacttttaagttgaagccagtactcatttaccattccaaaagtcctgtgacccttaaagattatgctagctctactctatctgctctacgaatggaacaagaaagcctgaatgacagcacatctgttcacgcatggcttactgaatattttaagcttactgttgagatctatgctcagaaaaaaagattcctttcaaaatattactgctgagctgggtatggtggcacgtgtccacagtcccagctacttgggaggctgaagcaggaagatcacttgggcccaggagtttgagtccagcctaggcaatgtagtgatgagaccctgtctctaaaacaaaaaacaacaaacaattagtgctcattgacagtgcacctggtcactgaagagctctcatggagatatatgagatgaatgtggctttcatgcctcattttgaaggttggctggctgtgtgaattattaactattcatggtatttctacaagatgctttgacttcagcattaaatagaaatacccttcatcctttgtcaggatttctgttgaattattcgagttttgagttatgtgaggttctctagaacctgtgccttgcagtatggctgtactgtattttccaacttattcccaaggacagcaatctctatcagtccccttcctttctgtctgagcgcagctctcctgctggactgctttataaacctgtggttagcatacggtttattagttgagttggctgtggcctggcagtcctgtggtacagtcaggatgccaagggttgtcacctctgcagggtggttctccttaaaaggggctgcaggcatttacagatgcttcttaacttacgatgaggttatgtcctgataattgtaggtaaaaaatgggcttagtacacctaacctgctgaccagcctagcttaccctagcctacttaaatttgctcaggacacttaacattagcttatggttgggcaagatcacctaatacaaagcctattttgtagtaaagtttaaatatttatgtattttattgaatactgcacattatgtaaaaattgcaatagtttcacaccatcataatgttgaaaattgtaagttaaaccatcataagtcagggactgtgcacttattcagccatcaaacaggcagtttattgattgattgagacaaactctcattctgtcgcccaggctggagtgtagtggcgcgatctttggctcactgcaacctctgcctccctggctcaagtgatcctcctgcctcagcctcctgagtagctgggactacaggcacatgccaccatccctggctgatttttgtgtttttagtagagacggggtttttccatgttggtcaggctgctcttgaactcctgagctcaggtgatccactcacctcgacctcccaaagtgctgggaccacaggcgtgaaccaccatgcctggcccaggtagtttatttttaaaacattttattactgttatttttttgagacagggtctcactgtgtcacccaggctggagtgcagtggtgcaatcatagcccactgcagcctccaattcctgggttcaagcgatcctcccacctcagcctcctaagtaggtgagactacaggcacgtaccaccatgcctggttcaagtagtttttgaagacttagtatatgccaggcactgctaggtgctgggaatttggcagtaaacaaaacagacaaaaatccatgtcatcaaggagccagcgtccagttatgacagatagtaaacaaatgtcagaggccaataagagtcatggggaggctgggtgcggtggctcacgcctgtaatcccagcagtttgggaggccgaggcgggtggatcacctgaggtcaggagttcgaggccatcctgaccaatatgatgaaatcctgtctctactaaaaaaatttcttaaaattatctgggcctggtggcatgcgcctgtaatcccagctacttgggaggctgagacaggagaatcgcttgagcccgggaggtggaggttgcagtgagccaaggtcgcaccatcgcactccagcctgggcaacaagagcaaaactccgtctcaaaaaaaataaagagtcatgggtaagggagtggaaggatgagcctggtggcagcttcctgttggtcagacacatgattgacaatcattcctaagcattatttcctgatttaagaaggtaaatgaatgcatttttcttattttactttctaaaaattgtcctcagttaaggagtggaaacaattgtagtaagaaaaacagtgacctagtactcagacggcctgtgttcctgaggttttcttatgggcagagtggctcagcttgggtaggcccggcctcctggcatctctttcctctgctgtaaaggagaatgttgactgggatggttttgagagtaccttttacctctcttgttctttgatgaaatgttaacactgaccttaaaaaacctttctgttggccaggcgtgatggctcacgcctgtaatcccagcactttgggaggctgaggcgggcggatcatgaggtaaggagtttgagaccagcttatccaacatggtgaaaccccatctctactaaaatacaaaaattagccaggcatggcggcaggcacctgtaatcccagctacttgggaggctgaggcaggagaattgcttgaacctgggaggtggagattgcagtgagctgagattgtgccactgcactccagcctgggcaatggagtaacactctgtctcaaaaaaataaataaataaaaataactctctgtttattttgcaggtgtgtgtggtctattgtgaggagctaaagtgctggtgcagggccattgtcaaatcaattacgtcttccgcagaccagtacctggcagaatgtttccttgtggactttgccaagaacattccagtcaaatctaaaaagtatgtacatgtttatctcaccttacgctcttttcagagacaaatgtcagtttcaaaggagaacgtccattttaaagtacggggctagaggtcactacactgagaaaagacaaaactggagttctttagcttccagaaggggtgctttctgggtttcaggtctgcacccactgactggcagagtgggtgggcaggatgaaggctgaggtggctctggccctctcccactgtccgtcctggcaggacaggcaggttcagatggtgttctttgcatctcctggctgctctctgcatctcctggctactctctgcatctcatggctactctctgcatctcctggctactctgcatctcctgggttctctatcacctggctgctctctgcatctcctggctgctctctgcatctcctggggttctctctctatcacctggctactttctgcatctcctggctgctctctgcatctcctggggttcttcctgcatctcctggggctctttctgcatctcctggctgctctctgcatctcctggggctctctttgcatctcctggggctctctttgcatctcctggctgctgtctgcatctcctggctgctgtctgcatctcctgggtgctgtctgcatctcctgggtgctctctgcatctcctggtgctctctctgcatctcctgctgctctctgcatctcctgggtactctctgcatctcctgggtactctctgcatctcctgggtgctgtctgcatctcctgggtgctctctgcatctcctggtgctctctctgcatctcctgggtgctctctgcatctcctgggtgctctctgcatctcctgggcactctctgcatctcctggtgtgctctctgcatctcctggtgcgctgtctgcatctcctgggtgctgtctgcatctcctgggtactctctgcatctcctgggtgctctctgcatctcctaggtactctatgcatctcctgggtgctgtctgcatctcctgggtgctctctgcatctcctgggtactctctgcatctcctgggcactctctgcatctcctggtgctctctctgcatctcctgggtgctctctgcatctcctgggcactctctgcatctcctgggtactctctgcatctcctgggtgctctctgcatctcctgggtactctctgcatctcctgggtgctgtctgcatctcctgggtgctctctgcatctcctgggtactctctgcatctcctgggcactctctgcatctcctggtgctctctctgcatctcctgggcgctctctgcatctcctgggcactctctgcatctcctgggtactctctgcatctcctgggtgctctctgcatctcctgggtgctgtctgcatctcctgggtgctgtctgcatctcctgggtactctctgcatctcctgggtgctctctgcatctcctgggtactctctgcatctcctgggtactctgcatctcctgggtgctctctgcatctcctgtgttctctgcatctcctgcgttctctgcatttcctggctgctctctgcatctcctggggttctctctgcatctcctgcgttctctgcatcttctgactgctctctgcctcttctgggtgctccttgccggctgctctcctgcctgtcctcagtttccttgtgccctttagggaggcttggctgcaagaaagacacttccaggaggtagagagaaacgcctctctccacagaaggggggttgctggcatagtctcagggtgcacagagcagagcttgtactcatgtaggtatccctggttgtcctgcttaaatgagggagggtgtgaccatcaatgaggttgggagatggctcagaatgagctgttgccaagatggtgctgtgcagtcttcactgcttctgggaccacacgtgattgtgttcgttagaatacaccagcaacaagtcagtcttggtgttttgtgatgacttttccatagtttcccgtcccagggtaagaggatgtcagtttaataaatatgaggattctgatttcactgaagaaagagcaataccaaatagacttgattgtgataagaggtgtctattttgttttgttttgtttttttgagacagtgtctcactctgtctcccaggctggaatgcagtggcgtgatcttggctcactgcaatctctgcctcccagttcaagcgattctcctgcctcagtctcccgagtagttgggactacaggcgtgtgccaccacgtccagctaatttttgtatttttagtagagacagggttttgccatgttggccaggctggtcttgaactcttgacctcaggtgatccacccgcctcggcttcccaaagtgctgggattacaggcgtgagccactgcgccagccaagaggtgtctattgaatagaagaatttcatggcatacgtgtttatcagacattgggaatttgcagtacttactgtaagagtaggtgccattcgagcttgtgatcctgcattgcatacaaccgtaatcgctgcaaaaacaattattgtgtttaactgtttggggagcttttgtttttgcgtttgatgttttacatttagtttgttttgggtgagaaaatcgtatgattaaatagagcttcaggagacttcagggggccatgggtgcagccacctttccctaacctgtctgagacagaagatggccaggctgcccagacaaggcataataggaaccctggaaagaaagccagttcatgtggaaatagtacgtggaagtggtttttcggccaggggtggtggctcacgcctgtaatcccagcactttggaaggccaaggcaggaggatcgcttgaggccaggagttcaagaccagcctgggtagcatagtgagacctggaccctacaaagaaaaaaatgtaaaaataaagtgctctgtcgtttgccaaagaagaatggaaattaaattgccaaacttattatttaaaaatctcagtcctgcagctcttttgtgcaaagttggcaaatactaattattaaaccatctgttcatttacagaaacttttaaggtaattttggtcatatattgagattgatatttagaaaatcttgaatagaatttgctttacaggtatgttcattagtatccagtatttgtccacctaaggagccttattagacttttttttttttttgagacagagttttgctcttgttgcccaagctggagtgcagtggcacaatttcagctcactgcaacctctgcctcccaggttcaagcaattctcctgcctcagcctcctgagtagctgggattataggagtgcaccaccacgcccacctaattttttgtagttttagtataagagacagggtttcaccatgttggccaggctgatcttgaattcctgacctcaggtgatctgcctaactcggccttccaaagtgctgggattacaggtgtgaaccaccacacctggccaggaggcttcttagacattgttttcctaaactcctacccctaggtcatgaaatgtcaatttcactgatacactatctatgtgccatatccgtgctttatgtatcaaaagagtacgattttttttcaacctcccaagaagcagtttttccctcttggccaaatgtctccaagcactgttggtggccatattagaaacagaaagaattgttttttgtgtgttttgttttacattaagtgtattaataaaataggtatactttaacggagtatgttatatataattttctatataatggagctgtttctgttttactttttagcatccgagttgtagtagaatcgtttatgcagcttccctatagagcaaaaaaattcagcctgtactgcacaaagcctgtcacattacacattgacttctgccgagacagtactgacattgtgtaagtacagtttcttaagtccttcgaatcattagtaaaagccttctatcaagtgcacgatctttgtatgaagtcagttcctctgtagaagtgctgagcaggaggtctctgttcttcaggaggggcttctgagtcagtgtttgtctgacctggctgtggttgagggggtttggagcagggcctgagctctgtgcttcttgcctttgtttcaaacttacaaaaagtaataaattaactgtaaagaaaaatattcataaaacataggatcatggagtattatacatgtgtacacgcgcacgcgcgcacggtctcacccttttgcccgggctgtagtgcagttgcatgatcatggctcattgcagcttcaccctcctgggttccagcaatcctcctacctcagcctcccaaatagctgggactacaggcacatgccaccatacccagctaactcccctcccctcccctcccccactccctctccccaccgcccctccgctctcctcccctgctcccttcttgctttctttttttgagatagggtctcactatcttgcccaggctagtttcaaacttctgggcttaagcgatcctctcaccttggcctcccaaagtgctgggattccaggcatgaaccactgtgctgggcccatggagcattataaaagagtccattgcaattttctccaggcccacatctttcctcctgggaggcctctgtgatcttttccagctctgaacttgcaggcctttgtcagtgcttttacacacacttatctatgtggagcttttaacgaaaattagaacatactgtcctatttgcagaattaacttaagaatatgtgttgaggccaggcgcggtggcttacacctgtaattccagcactttgggaggccaaggcatgggaatcacctgaggtcaggagttcaagaccagcctgaccaacatggcaaaaccctgtctctactaaaaatacaaaattagcctggcgtggtggtaggcatctgtaatcccagctactcaggaggctgaggcaggagaattgcttgaacccgggaggcagaggtttcagtgagccgaaatcgcaccactgcactccagcctgggcaacaagagtgaaactccatctcaaaaaaaaaaaaaaaaaagtatgttgaaactctttgtcaacatacgtatctcttctttctacttttagtctttttcgtgggtggatgtgattgacatacttgctgtatttaatcattcccctctgtgtagccactaggttgtttccaaaccatttgcacagtacagtcccgtaagtatatggatgaatctgaccgggcctggtggctcatgcctgtaagcccagcactttgggaggctgaggcaggcggatcacttgaggtcaggagttcgagaccagcctggccaacatggtgaaacccatctctactaaaaacacaaaaattagccaggcgcagtggtacgcgcctgtaatcccagctactcgggagactgaggcaagagaatcgcttgaacccaggaggtggaggttgcagtgagccaagattgcgccactgcactccaacctgggtgacagagtgagactccgtctcaaaaaaaaaaaaaaaaaaaaaaaaacaaaagaatatagataaatctgtataaaatacacagacgtagaggcatatatatatacgtgtgccccgcaccccatctttgctccctttttctagtgtttgactgcatcgctagtgtttgtacaggacagatccctgccctgggcagttccctctcgggtgcgggcgccatgtctgctgtcttgaatgagcactaccgagtggcctgacttctgcctcctgtggtctgtagagacatcagccccatcctcccacccggtgctcctcctcttctcccttcccgggacgatggcattatggaaggaaaagccacagggagcagtccagttctgactccactggcatgccatgttgcactgtgtactctgaactcagaagctgccttcatgggctgtttggtgaccttcccattctccactcaccccagcccccacagtttccttgtggtggtgagtgcatcactcttgcggctggcgtggcatctacactgatgtgaggataagtccctgctgaggccaatgcgccctaccaggccgccctccagccagccccccccactactcaccgaaggctctgggagtgggatttgctgcacacagcagcccctgccccctgtactgccctctttcagagcggcccactgcccacccttcaggcatgattggggcccctgtgtgtgcaacccagctcccctcagaggcagttggtcctgtctttcttgaccttctctgcatgggctcttcccagaacaaatgtgggcttccgggcccttccccacccaacctaggatgcccccagggaagggcctactggggtttggtcaccttctttgacatctgatgcctttgtgtttgtgttttatgcagaacacccttttaacgtgtgtattacagttttacagattttgtcaaattccccttcaaaaagactagcaatttatactgccatcattggggtatggaaagcactgttattcccacacaatattgaatatcgttagactttctaatttctgcttgtttgctcagtaaaaatggtatttttatttttctgacttgcaaagctgtcacatgtattcatgtgattattgtgtatgtgtgaaagagggagagagagagaatggctgatgtggttattctgtgtgtgtgagagagagggagagactggctgatgtggttattctgtgtgtgacagagagtgggagagagactggctgatgtggttattctgtgtgtgtgtgagagagagagactggctgatgtcattctgtgtgtgtgtgtgtgtgtgtgtgagagagaaggagagagactggctgatgtggttattctgtgtgtgtgagagagagagtctggctgatgtggttattctgtgtgtgacagagagtgggagagagactggctgatgtggttattctgtgtgtgtgtgtgagagagagagagactggctgatgtggtcattctgtgtgtgtgtgtgtgtgagagagagaaggagagagactggctgatgtggttattctgtgtgtgtgagagagagagtctggctgatgtggttattctgtgtgtgacagagggggagagagactggctgatgtggttattctgtgtgagagagacggggagagagactggctgaagtggttattctgtgtgtgagagagacggggagactggctgatgtggttattctgtgtgtgagagagagagagagtctggctgatgtggttattctgtgtgtgtgagagagagagagtctggctgatgtggttattctgtgtgtgacagagggggagagagactggctgatgtggttattctgtgtgtgacagagagggggagagagactggctgatgtggttattctgtgtgtgacagagagggggagagagactggctgatgtggttattctgtgtgtgacagagagggggagagagactggctgatgtggttattctgtgtgtgacagagagggggagagagactggctgatgtggttattctgtgtgtgacagagacggggagagagactggctgatgtggttattctgtgtgtgtgagagagagagagtctggctgatgtggttattctgtgtgtgtgagagagagagtctggctgatgtggttattctgtgtgtgacagagggggagagagactggctgatgtggttattctgtgtgtgacagagagggggagagagactggctgatgtggttattctgtgtgtgagagagacggggagagagactggctgatgtggttattctgtgtgtgagagagacggggagagagactggctgatgtggttatcctgtgtgtgtgagagaaggagagagactggctgatgtggttattctgtgtgtgtgtgtgtgagagagagagagagagagggagagactggctgatgtggctattctgtgagagagagagagggggagagactggctgaggtggttattctgtgagagagaggaggggagagactggctgaggtggttattctgtgagagaggaggggagagactggctgaggtggttattctgtgtgtgtgagagagggagagtgactggctgatggggttattctgtgtgtgtgagagagggggagagagactgactcatgtggttattctgtgtgagagagggagagactggctgatttacttgttcatatgttagattgggttttctcttgggttgtttgccttttcattattagtaatctactacatttttcttttttaaaaaagctaattattaggtaattctttgtgtgtaacaaggttttagaaccactgcctttactgccttttagaaatcctttgtaattctcttgaattgtttaatatctttcttataagaataaaaataaccaacatttttgagtaatgattatgtccaggcactgggctaagtgttctatgtacattatctcatttgatctttaaaagaattcttggaggatggtggtggcatctctggtacataaaatcagaagaaacatagaacatcattctgacctgacattttatttttttccttgcttccaagtttctcctctttccccactgcctacagcttttcctacaattttctttgcaaagcataagaaagatgtagaaaggacaagatgacaggggtaaaatgggagccagtgagagggcgctagggtcagcagagtgaggaacagtagttttatagtagccgagacccagtgcgttagctcacgcctgtaatcccagcactttgggaggccaaggcaggagaatcacttgagcccaggagtttgagaccagcctgagcaacatagctagaccctctctctattaaaaaaaaaattttttttaatcgctgagtgtggtggggcacacctgtagtcctagctactcaggaggctgagatgagaggatcccttgagcccaggagttcaaggctgcaatgagctgtgttcatgccactgcactccagcctggataacagagagagaccctgtctcaaaaaaacaaaatgaaacaaagatagtatctggctctcccatgactgcctgtgagggtgtcggtgtaccagcatgtgtcgcgccctctctgtgccagactgtgttagacaccccacactcaggatccctgtcccaggagcttgtgttctggttgaggagactgatttgtctggggatggtggtggtgtgacagacagtgcagtggtgagcacaggttggtctcagtggggcctctgtgctatgagtctgcaccggtgcaggtgacagtgttgagacgagcgtgttgcaggatgcagtgggatcctcacccccagagcagggccagtgccaggtgccccatcatctgcatcacgtgttccatatgtagtgtgagaaatgtccagtgcatggtttacaaaatgctgttggtgtgctagcctcagatttttatgtaatggagttgcatctgttcactgttccagacctgccaagaagtgggacaatgcagctattcagtactttcagaaccttctgaaaggtaagccagtgcctgatcactgcagcctgcctggaagtgacacccacagaggcctcagcttctgctgctggcgggggttggagatgcccctgttggccaaacggccctcctcagaggagttccctaagctacctggggcttcctccagctcaagtgccacagtaactctgcacccctagtggcagtggatgtcagtaattgacagctgagatcagcagggggctgtttgtgcaggggaacccttacacagtaataatacctgcctcttcgtttgcataaaagctgcggcgctgcaaaataaattcatgtggattttattgtaccagcaattgatgaaaaacctagcatttttagtgagcaagagatagtaaatggatatttattgtgtaatattcattacttctaatttaagatgcataaaatgtcttcagctgttctttttattttatatcagtgactataaacagtgtcttttgtgggatctgtcttaacctctggcagtcagatacctggttttagtgatagggttggtggatgggaaacacctggggtgctgcctggtgcctcgttgggtcctggccccactcctgtgctgtgtcatcatctgggtagaggaggagccagaccctttgacctgggagcagtgggaggctgggaggtcactgtgactggagttttggcccctgtgagccatgggggctgctgggagatgagaatgcgggtctggaggaggccggccacttagtcctcagtggctcaggcaagtgacttagcctctgagcctggtctcctcacctgtgacatgaccactgtacttaaccttgaaggtagtggtaagaactcagcgaaagaaggtttctaaaggacttagcacagcacctggtaggtggcagtgatgctgctgctgcggggttttgagtctctaagggagtagccgggtgctgcactccgtggggctttgcagggtagaatggacctcagatgaaggcctgggactggaaatctgggtttgggaggcatggagaagagaggaccacagggtggcacaggaacctgttgacagggacaggacccataatccactccacaatcaggagtgccttttcctaacatgctccccctggtcctgcccgaggaagacatttgggcactcttaagtggttagcagaggttactaggtgggaaatcgtcatgattgtttcaaatatacttttaacatcagctgatttgtgttttcatttatgctatttagcaactacccaggtggaagccagattatgtgctgtggaagaagatacatttgaggtttacctttatgtaactataaaagatgaaaaagtaagtgaaagaattgtatttttataatatttcatcattttaaattttactttaataaaacagaataaatgccaagaaaaacactgtagttcgtacagcatagaaattgtcttaatctcttaaggtctatcttagacccgaagttagccaggtctgtgttttcttcttttgattactttaaaaaatgactttggcattttatttaaacatggtcaagaaattattcctatagtgatgagcatgaaatgttgttttcttctcagggaacatgatttttataaatatactaatttgctgtagcgttagttcactgcctttccccctagactttctcactgtatgtaacgtgcttgctgtaaataattcagatcacaagcagaaagaaagcggacatcatatgtgagtggcccctacctctgccaggtgccagctgctagcattttggcctctgccctttctgaaggatggctcagggcacacctcagcaccaggcagaggtggacagaaggggcacacatccagggctgctcagagcccatggagggtaccttaaccatggattttttaaaaattgtattttgaaatagacttacagaagagatgcagaaatagtgcagaaattttgggatatgctttgcccaggttgtcctgatgttaacatagcacaaaaccacagtacagtttttaaaaccagaaaagtaacattgataaaataccactgaaaacctgcaggcaggtgaatgttgacagtttcccggctgatttcctttttctgatgtaggatctgctccagcacctcccactgcgcctgtttgtcatgtctccttcccctcctctggcctgtgacagctcctcagtacttccatgcctctcatggcattgactgctttggaagagcagtggtcagtggttttgtagaatgttcctcaatttggtttgcctgatgttcctcatcattgtattaaggctatgcatttttggcaagaagcccacagaagtgatactgtgcccttctcagtgcatcccagcaggggtttatgacgtcagtatgtctaattactagtgatgtgaatggtttttttccttcagcttctaagtttggggtacctgtgcaggatgtgcaggtttgttacataggtaaacatgttccatggtagtttgctggccagatcatcccgtgacctaggtattaagcccaaaacccattagctattcttcctgatgctctccctcccccctccccaccccccgacaggccccagtgtgtgttgtttcccccagtgtccatgtgttctcatcatttagctgccacttataagcgagaacatgcagtgtttgtttttcagttcctgcattagtttgctgaggataatggcttctagcttcatccatgtccctgcaaaggacacaatcttgttcctttttatgactgcatggtattccatggtgtgtatgtaccacattttgtgatgtggatgttgatcacctggttaatgtggtgtttgccaggtttttcctgtacagagatgttagtttttccttctgaaattaataagtatcttgtgggggcctactttgaggctgcagatagccatttcatcaatgattcttggctgtgaaagatattactgtggtgtatacctgtttcatctttccctctacatttttctcctctcctctcctctcccttcccttcccctctccttccttcccctccctcccttcccctcccatccgtctctctctgtctcctaggttggagtacagcggcacaattgtagcttgctgcagcctcaacctcctgggctcaaaggatcctcccacctcaacttcacaagtagctgagactataggtgggcaccaccatgcccatgagttgcgatctcattatgttgcccaggctggtctcaacaggcagtcttctcgccttgtcctcccaaagtgctggtatcacaggtgtgagccaccacacccagcaccttctgcatttttaatttttattatttatttatttatttttttgagatggagtctcactctgttgcccaggctggagtgcagtggcgcaatctcagctcactgcaacctcttcttcccgggttcaagtgattctcctgcctcagcctcctgagcagctaggattacaggcaagcatcatcacacgcagctaatttttatatgttaagtagaaacggggttttaccaagttggccaagctggtctcggactcctgacctcaagtgatctgcctgtctcagcctcccaaagtgctgggattacaggcattagccatcacacccagcccccttcttcattttttctttttttagacagagtttcattcttgttgcccaggctggatctcaatggtgcgatcttggctcactgcaacctccgcctcccaggttcaagtgattcttctgcctcagccccctgagtagctgggataacaggtgcctgccaccacaccggctaattttttgtatttttagtagagatggggtttcaccatgttggccaggctggtttcaaactcctgaccttaggtgatccacccgtcttggcctcccaaagtgctgggattacaggcgtgagccaccgtgcctggcccccttctgcatttttaattggaattttataccaaagaaccctccctcctcccccatatattaattattcgataatttgtattagtatggacttttggaaatgtattttatttggggagttataatctataactatcattattgccttgctcacattaccttggattctggccattaggtgctccttcaaaggggcttttgtatactttcaatgtgccccatcattacttgaacactctttactctctgatgccacaatgtttatcattttgttatttgccagacctagccctagaatcagccacttcttccttttttttttttttttttttgagatggagtctcactctgtcgctcaggctggagtgcactggcgcgatctcggctcactgcaagctccacctcctgggttcatgccattctcctgcctcaacctcccgagtagctgggactacaggcacccgccaccacgcctggctaattttttgtatatttaatagagacggggtttcactgtgctagccaggatggtctcgatctcctgacctcgtgatcctcccaccttggcctcccaaagtgctgggattacaggcgtgagccaccgcgcccggccactggaatcagccacttcttcaagcagctctggttccttttattgaagaatgatatttaaatatctagatgagggcacttggtgtgcttgttccaactggggtgtcatgattgtaggtcctctcagcagaaaatattaggaaatatatgtatgtacttgctcccatgcacacacaaatctatatttctgtatccatctgtacacatattaagagctttgatatctctgatttgaatccagcaccatagggttcattcttaccctctcctttccttatttattcatttattttttggagacagggtcttgctatgttgttcaggctggccttgaactcctgggctcaagtgatcctccagcctcaccctctcaagtagttgggactataagcgcataccaccatgcctggcctcttattcttttttttttcctgaaacggagtcttgctgtcacccaggctggagtacactggcgcgatctctgctcactgcaagctccacctcctgggttcacaccattctcctgcctcagcctcctgagtagctgggactacaggtgcccgccatcacacctggctaattttttttttttttttttttgtatttttagtagagacagggtttcactgtgttagccaggatggtctcgatctcctgacttcgtgatccacctgtctcggcctcccaaagtgttgggattacaggtgtgagccaccacgcccggctggccccttattcttaatgcctttctccaccagtgagaaacctactctcgttggccgcagtctacgtatttgattcatccatgtattcacattaagtaatttcaggattgctaacccacactcctgtgaaaacaaaatttgtatttagtcttcacattatgcagccaaaatactgtttgccaaagttacttaggttgttttttctctttcgcaccttcttcagtgtgattatgttattcttttgtaatggggttcatttgttactgcttatattgcatgttgggttccctaaatgttcctcacatcctggttcattttacctatgacttttcattacttattttataacttagtaaaaataccaaaatcagccaaaggctgtgacttacacctgtttaatcccagcactttgggaggctgatgtgggtggattgcttgagctccggagtttgagaccatcctgggcaacatggtgaaaccttgtctctacaaaaaatacaaaaattagctaggtgtgatggcttgcacctgtagtcctagctacttgggaggctgaggtgggaggatcacttgtgcctgggaggcagagagccaagatcacaccactgcactccagtctgggtgacagagcaagaccctgtctcaaaaacaaacaaaaaaaaccgccaaaatattggctgcagaaccagtcgttttttttcatttttttaaacctgagagatctatcctgtaaggaccagtcttgtaaaatatctttttttcaaataaattctctataaacttgctttcttcttgcttttcaaaagtagatctctttctaaccatgtaggttgtatgttgataatgactctatcttttttttttttttttttttttttgagatggagtttcgctcttgttgcccaggctagagtgcaatggcgcaatcttggctcaccgcaacctctgcctcctgggttccagtaattatccagcctcagccttcccaagtagctgggattataggcatgcgccaccacgccgggctaattttgtatttttagtagagacggggtttctccatgttggtcttactttaaggtggtaaagtgcagaaggcagggaggttcgtgcttagctgagagagcttataatgcatgcatgagatcataactgccggaggaaaaaatgtgggccagcaatcctttaccagctcccaaaggtggcaacaggatgtgtcccaaggtgttttcttttttggtctggcttctttcatttggcaaaattattttaagatgcatccacgtttgttgttgttgccaagtcctcttccattgtgtggatatactacagtgtatttacccattaactcgttgatggatatttgggttgtggccataggccccttacagatatttatgtacaagtcttcctgtggatctgtgctttcatttctctcgagcattacctaggagtcaaacttttggatcatattgtaggtattaagaagctgccatattgttttccaaagtggtggactattttaccttcccatcagcaatgagagttctagttcctccatgtcacttgtgtaaacattcggctaagtgtgcagtagcacctcattgtggtttaaatttgcgtttccctaatgatggttttatatgcttatttgcaatcttcagactttgatgaagcagacattcagattgtttgcccatattttaattgtgttgatttcgttttattgagttttgagagttccttatatattctggatacatgtcatccggatacttgattttaaaagaattttgcctcatctgtttattctcttgaagaacagaaatttaaaattttgagcaaatccaatgtaacagtctttcctttgatggttcgtgttttgtctctgtcctcccaccaggcttttgcctggccaggtagttttagtgctacagtgcgtatgtccaagaagacatctcatgtgtttcacacagatgcttgctgtttttcctcatcaggattggtgggaagtatttggtttaccagagcaggagtcaaatctgtttctctcagattatgttctgtaaaataatttctctgaaggtagaactttggggttaagtttggaatatttcctttaaaatcgcttgactatatttgtcttattagtcatgaaatgtttaaaattttacaggtttgtgttaatgatgatcttgttgcaaagaactatgcttgttatatgtcacctacaaagaataaaaaccttgattatttagaaaaaccaagattgaatataaaatcagcaccctccttcaataaactcaatccagcacttacactctggccaatgtttttgcaaggaaaagatgttcaaggaatggaaggtgagtagattctcatcatatcaatttcccttacattgttttattaataatcttagtgtatagatataagttgtacagacttttccccacatggagacaaagacttggactctgtttaaagtttaatcctgatgaggctgtgacacattgtaaggtcttaaagtgttacagtttgtgtttatgagaccaggaaaaaaactgccctcgatttctgttttttttttgagacggagtctcggtctgtaacccaggctggagtgcagtggtgtgatctcggctcactgcaagctcctccccccaggttcacaccattctcctgcctcagcctcccgagtagctgggactacaggcacctgccaccatgcctggctaatttttttgtatttttagtagagacagggtttcaccatgtcagccaggatggtctcaatctcctgacctcatgatccgcctgtctcagcctcccaaagtgctgggattacaggcgtgacaccgcgcccggcctcaatttcttattaacattgagttatgttgttagaagtccaaatgtttgcaatttagagatactaagaaaacaaattttgaatatttagactttagacacctttaaaaaaaagagctatttatcacaaataacccttagcataaaaatataagagctagtcacggattgtggaaataatttccaatgtttctgtccacatccagtttttagtcccctcaccttgtgtcccctagtcaggtttcctgtaacctcagagcaaaagcaagagcagaagtaatgtactaacgagttcacatttttattttgggctttatttcatgctttaattctgaaatttattctttctatcagattcacatggtgtaaattttccggcacaatctctgcaacatacatggtgcaagggtattgtcggtgacctcaggccaacagccacagcacagggtgagttctgctaatgtggtttatttcataggcagcatgaaaaaaatattcttagctttttaaagattagaaaggttgtctagaaaggccatggtaattctttctcttttcttaatttaatgtaaccaatttgtgatgtagatcctgaaagagttcatgtgtcctgcatttcatacttagaaattttactgtcacgtaaagaacataacaggcaccagttcatgtgcaggactgatttattccagcctagccatcgaccagtaatcactgtctgtccctagagtgtacatatgtatttattattgatttttcacttaggcaacaggatgcataaaaatagggaagacatgcttatgagggcagaaatacgtagttttaaattccagtcttcaagatatttaatgaattggaattgctgggtgagggtgaaatttttcagcccctttgatgactggctcgccctctgtggtggttcctccaccatttccctcttatgctggatgtgtgtccaggaaggcctcacttcatgtcttggataggttcttggaaactgactttaagtgaaacaatgttataacgaaacaaccttgagcaaagcaacttaatttgaggggctgctgtactttgtttcccttaaatctgtggtttccaagaacctactgatgagtcaagtgaggacttactgatacctgtgggtgtaatatttcatgtgtatccatagtaaaccacaactacattaaagctttagccaactaaaatatttcctgtacttcagattattttcaattactttggtaatgttgcttatcatagagaaagaaagatacaaagggtttttctcagccactttgccaactagggtcctccatggctggcagtgcccaccccgtccccgacctgggcctcactcagccctgggcctggccgctggaggctccctacccactcagcccatctgtgctatagattgtatccgcatttggcagttcccaagctcttgtcctgtgtccaagaagaataaggttatgctgacagaagggtgaggatgggcagagaagaattttatggagcgatggaatagctctcagtgtaacctcattcttcttggatgggtggtttctctctcagtgtgtccgggctggcactttttatggactcagaatggggagtgcctgctgattggttagtgagtatgcaaaaaaggttaaagcaaacacaccactcaaaggtgggtatagcagtgtagaaaaccaactaggaaagggtaggtgcatatgaaataagtgaaaggtagacatcaatcagaggaaaaaatgccaaacggaaagacagtttctcaatccagtctgtgtattacccgagacttgtagctaggctttaaactggtttctgcttgaaaattggttttcaccagggacccaccccatctcgctaggcatttgactgccttttgctgctatcaatagcccagattgtaaaaacctgtcatctcactaactgctttttaaaattgtagagtcagggccaggtgcagtggctcacacctgtaatcccagcaccttgggaggtcaaggctggcagatcacttgatgctggcagttcaagaccagcctggccaatatggtgaaaccccgtctctgctaaaactacaaaaattagctggatgtggttgcacatgcctgtagtcccagctactcgggaggctgaggcaggagaattgcttgaactgggaggtggaggttgcagtgagccaagattatgtcattgcactccagcctggatgacagagtgagactctgtctcagaaaacaaaataaaataaaattgtaggctgggcacggtggctcatgcctgtaatcctagcactttgggagaccgacacaggtggatcacctgagatcaggagtttgagaccagcctggccaacatggtgaaaccccgtctctactaaaaatacaaaaattagccaggcatggtggcgtgtgcctgtagtcccagctactcaagaacttatttgctgcatgatgaaatgagaaactaggatgtaaaaaggaggagtgaaccctgtagactcttttgcattgaaggtaagggtggcaacacagtgtagagagaacaggctcggggctagaagccaggagacatgtgttctaatcctgggtctaccactggcttggtgggagcctcgaccttccaagagcctgcaactgcccatatgtacacggaggggaggtaggggtagactagaaggcccctggagttctagcatgtctcagtctgggaattttttttttttttgagacggggtcttgctcggttgcccaggcttgattgcagtagtgtgatcacagctcactgcagcctcaacctcctggcctcaaaggaggctgcggcaggagaatcacttgaacccaggaggcagaggtttcagtgaaccaagattgtgccactgcactccagcctgggcgagtgagactccggctgaaaaataaacacaataaaataaaatattatagagcctttctttccaaagttttccagacggtatttataaaatttttatttcacagaaatggggtcctactatacatacctctttgtaatgtattttacttagtatatggctgaattccctttctaggtcaaatatatccggtataatgtgtttaaggacataaactctgatgtgagactgccagggtgtcaggccgcttccttctctgggacatgggatgtcatccccatccccctgggagttactgaatgggccatcgtgcagcgtgcttggctcagcgcctggcctgtggcagcctcagcgcatgtggcccctgccccagattctgatatgcctcttgtagggggtccccaggtgagaattacagcagaaggtagcacctgttgttgatgggcatgtattctttccatttatattctttttccattggaggaataaaaataccaggcactacatcatcgtgtttaattattgcgtggctttccattgcttgatatgtcaaaattattttcaggagtcccagcttgctgggcagaaattgtttcctgcttattacaatcagtactggaatgaactatgcttatctttgaaaaggaaaaggttatggtgaacaataacaaaaaagataatgtgaggtgtaactgaattggcatgtaaaaagcagaattattagatgttacttttctaagtatagatttccctttcctttaattattgtgagaaggtacttcagttatatttcagttagtttttggtgtttctctttgaagttgcctaatatttttgagaatcaaagtataatacttggctaatacttgatttgctaatacttgattaaacaatcacatattacagaagggctacagtgaaaaataatttttttatttgcaacctcttcttaccccaggatgtcccctagagataaactcactttttaaagttgtttattttggtattatctccagattttaaaataattgtgtatattttactattactaggcttcttcactttagacattgtcttgatttctagggagattcactctcgtgcccctaacccacattcattcattcatcagatatttatgacgccctcactgtcaggtgcttttctagggattcttaggagggaaacaaagtctgtgcttccatagagtttacatccatcttctcaataaattttttattttacaataatcacaaacttacagaaaagttggagagtattacaaagaacttttttcccaaaccatttgagaataagttgctaacctgattccccaatacttgagtttttcctagaaagaaggacattctcaaaaatatccacaatgcaatcatcagagtgtgaagattaacactgatatattgtgatcatataactcccaggcaccattcaggttttgctggttatcaaagagacgtcgttcagcatcacttgttgcatttagagaagacgtttcttgtttttgttttgtttagtttttgagacggagtctcactctgtctcccaggctggagtgcagtggcacatctcagctcactgcaagctccacctcccaggttcacactattctcctgcctcagcctcccaagtagctgggactacaggcgcccgccaccaagcccagctaattttttatttttttattttttgtatttttagtagagacggggtttcaccgtgttagccaggatggtctcgatctcctgacctcgtgatccgcccgcctcggcctcccaaagtgctgggattacaggcatgagctactgcgcctggccgagaacacatttctttagtctttcctctggaacatttcctgggtctccttgattttcatgaccttgcactttggaagattacagacctattattttgtagaatgtgttctggattttggtcattctaataggggtgtagtggaatatcattattttaatttgcatttctctaatgacgtaggatgtgagcatcttttcatatgcttatttgctgttggtatatcttctcagatgagatatctcttcaggagttccttatttatttatttatttatttagagatggagtcttgtgctgtcacctaggctggagtgcagtggtgtgatctcagctcatggcaacctctgcctcccaggttcaagcctcctgcctgagccccgcgagtagctgggattacaggtgcccgccaccatgcctggctaatttttgtatttttagtagagacggggtttcaccatgttggccaggctggtcttgaactcatgagctcaagtgatccacccacctcaaatgatccgactgcctcggcctcccaaagtgcggggattacaggcatgagccacccaccatgtccggcaaggatttggctattttaaattgacttttttgtcctcttagtgttgagttttaggagtcctttgtacattttggataacaatcctttttttacatgtgtcctttgcaaacatttcctcctagtgtgtggcttgtctctcattctcttgacaatatctttcacagagcagaaatgtttagttttaatgaagtccagctgatcagttgcttctttcatggattgtgcctttggtgttgtctctaaaaagccattgccatactcagggtcatctaggttttctcctatgttattttctaggagttttgtattttgcatttttcatttagatccatttgagttgatttttgtgaagggtgtaaggtctgtgcctagagtcacttttctgcatgtggatgttgagttgttccagcaccatttgttgaaaagagaaggttgggagttttattagagaaatcttacatattgttttgaaaggaagctcattgacgctagagaagtttttgggagctggcaagctctgattggtaggtaatggcggtaggaaaaactagtcttaaagtcatggcaggttatttcagtagctaccaggtaaaactggtgttgggattctagcagtgcacctcaacagcggggccaagaaggtgctctgtgcctcgagtacttttcctctggcccctcgactctgatttagttggagatgaaagaatgacctagtttgtataattaactttcacaggaccattgggtttaaagtgattatttatatacagtcatgtgttgcttactgatggactatgttctgagaaacacgtcattaggtgattttggtgtgcaaacatcatagggtgtacttacccaacctacatggtgcagcctactacacatataggcaatatggtatagcctatggctcctaggccacaaacctgtacagtatgttactgtattgaatgctgtaggcagctgtaacacaatggtaactatttgtgttatctaaaccaatttaaacgtagaaaagatagtgattatgctatgatgttgctaggcaataggaatttttcatcttcattaaaatcttatgagaccaccatcgtatatgtggtctattgctgatggaaggttggcatacggcacgtgactggagttggattactgtctgccatgtttattactgtatttgatttattgcccttgtttttttgttcctcttttgactttgctctttttctaccatttgtgattttaattgggcattttgataccatataaatggtaggaggggtggagagagggaaataaatgtctagagccctgtaattagagtcagtcttctagggagcctgtacctttgggctgcacgcttctcaggtgcccctcagcatccctcacctctcaccttatgtgggacaggatggctggaagggactgagttgtgttattttcctcccccaccagaaggttaaatcgggctgtatttcccttcctctaggttagataggttctgataaactccagtagtttaggctctggttcaatagtttctcctgaggtcaggcccttttgggaaggaacagcacgccctttatatttccaagtagttacttttcccctcttcctgtcgaagcacgagattttcctgtggtattcactgtgagaacctgctagagctccaggaggcagaactcacagaagtgtggcacccagcccctgaccccggagttttaactaacggaggtgtccgtgccgaccctccagcaaattgtcagtttacagttcaggtttccctcctcactcctggtcccatagaagtttattctgggtttctgcccctgtccattctgagtctctctgtccatctgtcagtctctccagtgctggggcaacagtttgccctgtgacctcactttgatggacctaggaagaattcctgatttttcagtgtgttcagctttttacttgttgttaagatagagtgataaccatcaagctttttacatgctcgactggaaactggaaattacactaaattttaaagtgtaagattgacaaatcttggagattctaattgcttttctttttttacttgtattgtccatctttttttttttttttttttttttttgagatggagtctcaccctgttgcccaggctggagtgcagtggcacaatctcagcttactgcaagctccgcctcccaggttcacaccattctcctgcctcagcctcctgagcagctgggactacaggcgcctgccaccacacctggctaattttttgtatttttagcagagatggggtttcaccgtgttagccaggatggtctagatcccctgacttcgtgatctgcccacctcagcctcctaaagtgctgggattataggcgtgagccaccatgcctggctatattgtccatcttcattgactccttaagttgttccagattctcatttatggaaccctatatctgtgtgatttgaatcttttaatatctattgagactcctattatgattcaggtatgatctctcttggaaaatattctgtgtccaccttagaaaaataggtgctttgctgttgttggttagaatgttatagaaatcttaattaggtcatactggttgatagcattgttcaaatcttctttatctttattgattttccattaactgttctggcaattattgagaaagaggttttgaaatagccaactataattgtcttgttttctctttccagttctgtcagtttttccttcatgtattttgaaggtctgttacttaggtgcataaaggcttagaatttttatgtcctctaggcatgggcaaggacttcatgtctaaaacaccaaaagcaatggcaacaaaagccaaaattgacaaatgggatctaattaaactaaagagcttctgcacagcaaaagaaactaccatcagagtgaacaggcaacctacagaatgggagaaaatttttgcaatctactcatctgacaaagggctaatatccagaatctacaatgaactcaaacaaatttacaagaaaaaaacaaacaaccccatcagcaagtgggcaaaggatatgaacagacacttctcaaaagaagacatttatgcagccaaaagacacatgaaaaaatgctcatcattgctggccatcagagaaatgcaaatcaaaaccacaatgagataccatctcacaccagttagaatggcagtcattaaaaagtcaggaaataacaggtgctggagaggatgtggagaaataggaacacttttacactgttggtgggactgtaaactagttcaaccattgtggaagtcagtgtggcgattccccagggatctagaactagaaataccatttgacccagccatcccattactgggtatatacccaaaggattataagtcatactgctataaagacacatgcacacatatgtttattgcggcactattcacaatagcaaatacttggaaccaacccaaatgtccaaaaatgatagactggattaagaaaatgtggcacatatacaccatggaatactacgcagccataaaaaggatgagttcaggtgctttgtagggacatggatgaagctggaaaccatcattctcagcaaactatcgcaaggacaaaaaaccaaacaccacatgttctcactcataggtgggaagtgaacaatgggaacacttggacacaggaaggggaacatcacacaccgggggcctgttgtggggtgggggtcggggggagggataacattaggagatatacctaatgttaaatgacaagttaatgggtgcagcacaccaacatggcacatgtatacatatgtaacaaacctgcacattgtgcacatgtaccctaaaacttaaagtataatttaaaaaaaaaaaacagagcagctgaaaaaaaaaagaatgtttatgtcctcatgatgaattgattcctcagtcattgttaaatggctctctttatcccagatagtattctttgctctgaaatctaccttaatattaatatagcttatctagatttattttggttaatattagcatagtatatctttttatgtccttttagttttaacctatttgtgcctttatatttgaaggggagttcttgtagggagcatatagttgtgtccaatctgtcaatctctgtcttttaattggagtatttaaatcatttctatttagtgctatttatttaaaattttttgtcatttaaaatttttgtgggcacatagtaggtatgtatatttatggggtacatgagatattttgatacagatatgcaatgtgaaataagcacatcatggagaatgggatattcattctctgaagctttattgtttgcattacaaacaatccagttacatctttaagttatttaagacttacagtcaccctgttgtgctatcacgtagtaggtcttactctttctgatataatgtaatgtattgatattgttggctcttaatctagcatcttgctgttagttttctgtttgtctcatctggtttttgttccctttaccctatttttttgctttcttttggattaagcaccttttgtgttccattttaattcctttgttagcttattagccataatttttttttttgagacagagtctcgctctgtcattcaggctggagcgcggtggtgcaatcttggctcactacaccctctgcctcctgggttctagtgattctcctgccttagcctcccgagtagctgggactacaagcatgcaccaccacgcccggctagtttttgtatttttagtagagacggggtttcactatgttggccaggctggtctcgaactcctgaccttaagtgatccgctggcctcagcctcccaaagtgctgggattacaggcacgagccaccatgcctggtcagctgtaattttttgttttgtatgtttagtggttgctttagggtttagagtaaacatctttacttctcatagtctaccttcaagcagtattacgcacttcatggatagcatgaggaacttaacagcagtctccttccatttcctccctcctggcctttgtgcaagtgttttcatgcattttatttatttatttatttatttatttatttatttatttatttatttatttttgagacggagttttgctcttattgcccaggctgtagtgcagtggcgccatctcagctcactgcagcctccacgtcctgggttcaagcgattctcctgcctcagcctcctgagtagctgggattacaggtgtgcaccactatgcccggctaatttttgtatttttagtagagatggggtttcatcatgttggtcaggctggtctggaactcctgacctcagatgatccacccgactcggcctcccaaagtgctgggattacaggcatgagccactgtgcccagactgttgtcatgcattttaattctacatatattagaaaccccacaataattcatcattttttattaagtagtcaattctttctttttttgaaagaagaaagaagttgaattttctaacatgtcataagcgtgcaggcaggtcatcagagtctgtgctgtttctgtcttgttggccttgccatcctgaaggttttgccgccatcctcctattcaatttatttatcactgtatctcccttccagctagctggggggcagggagaagaggtgaagggggtacaactcagaggttgcacatggtgctttctctctcatttctttggccagaatgttcttgtgcagccatgcttaatgggagatgaaggtctgggagaggttgtcctccttttggattgccaggctcccactaaaaatcaggggttctgttacctcagagttagaaaactgcagccatgggccaaatctggtctaccacctatttttgtgctacctgtaagctaaaaatgatttttccatttttaaatagttgaaaaaatccagagagaaagaatattttgtgacacattaaaattatatgaaattgaaatctcagtagttacaaataaagttttactgaacatagctggactcattttcttacatattgtatacagctgcttttgcactgtcagagctgagttgagtggccgcgccccaggccacctgtcccacaatcccacaaagcctgcagtatttaccagctggtgctttgcagaaggagtttgctgaccctgatctggagcaaggactgaatgatattccaggataactaacagaccctgccacactccccagcacagagacttcagattttgtgtgtccctgtaaattttaattctcttttaaagagatttttaagataagaatatatgtttttatatttcccttcatatttatcatttctggtggtggtctttattctttttttttttttttcttttcagagacagggtgttgcactgttgcccaagctggagtgcagtggtgtgatcatgactcactgaagcctcaaacacctcagcctcccgagttgcagggactaggctcacaccaccatgcctggctaattttcaaattttatttagagacaggttttcattatgttggtcaagctggtctcaaactcctgacctcaggtaatcttgcccgcctcggccttccaaagtgctgagattacaggtgtgagccactgcacgctgagacctttctttggcttactttgcttggatggagcacatccataccctaagggcagggtatgggagctgtttctcagctcttgagccctgttactctcattgcaatggcagaggtggctttctggattgcagatcaatttcctcattacttatgacactgcacatattttcatgttccttttggcaattcgtctgttctcctttgtgaaattcctgtttacgtgttttcttataataagctttgagagtttttattttttatggagacagagtctccatatgctggccaggctggtctcaaactcctggcctcaagcagtcctcctgcttcagcctcccgaagtgctgggattataggtgcaagccactgtgcctggctgagtttttaaaatatattctggagacgtcatttgtattatagatagatttccttctagtctgtggcttttcattttcttaatggtatttttcagaggagaagtttttgatttttggtaaagtctagctaatcctttttcttttaggattttatgtcctatttaagaaatctttgctttctctatattttctacttttggcttttacatttaattctaggatccatctcaagttagtgatgtgaggtaagggtcaggatttggttttgttttttccatgtgggcatccagttgttccactacatattattttgtatttgtggagctgcatcttcaaggtgggttcctggaagaagggtttctggtcaaagaatggttttatctctgttgccaggtgctgtgggtcctgtatcatctgggagtctcatgggaatctaggagactgcctgtttgcccatagcctcaccagcagagtttcaagtttttggatctttttcagtttgcagtgagaaatagtatcttagatgagtttgcatttgcatttctcttattatgagtgccacttatgattctttaagaagtcacatacattaattgtgatttttttttttttgagacagagttttgctctcattgcccaggctagagtgcaatggcacgatctcagctcaccacaacctccgcctcctggattcaagtgattctcctgcctcagcctcctgagcagctgggattacaggcatgcgccaccacacctggctaattttgtatttttagtagagacggggtttgtccatgttgatcaggctggtctcgaactcccgacctcaggtgatccacccgcctcagcctcccaaagtgttgggattataggcatgagccactgtgcccagccttgttgtgatttaatatatatttggacgtcttttcatcatctcattttgtgggtatgtgttctttttttttttttaagacagagtctcgctctgtcacccaggctggagtgcagtggctcactgcaggcagtgagatcatggctgactgcagcctctgcctcccaactttaagcaattctcccacctcagcctcccaagtagctgggattaaaggcacgcaccaccatgcccagctaatttttgtatttttagtagagacagggtttcaccatgttggctgggctggtcttgaactcctgacctcaagtgatccacctgccttgggctcccaaagtgttgggattacaggcgtgaaccaccactcctggcctctttttgtgttttctattgaccgtaattttcctttctattttctttattattttctgcctcctcttgaattgaccattttccccctcttccttttttactcttatatatattgtatttcatttctctgagccttaaattttatatatagctatactttctaatgaagtttcaaggtcatcattgtctgtcctcacatcaagaacgtcacattttcttttctaaactcctcttttcatttctgttctgttttctaaaattttaatttaacttgttttgtaaatgcattttgcactcagtttttctttcaagttctttggagtggaattgcttgggttcgaatcccagatctgttctttattagctgaaataaacatgggcaagttatttcacctttctgtgcttgcttttcctaatctgaaaagggggaaataattgtgcccgtagagaaatcacatggaattcaataacgcacatggtacctatcacatagaattgaatcagttaattcatataaagcatttagaatagttcttgatataagtactaagtagatgttgattatataattaatattattgtactactggtttatttttctcattccccaaatatatacttcgtagttctttaagtagggaggtgtctttgttcacgttgctgtaaaggaatacctgagacaataatttagcaagaaaagaggtttatttggctcacagttgtgcaagctgtataagaagcatagagctggcatctgcttatggtgaggcctcaggaagcttccaatcatggcagaaggggaacaggagctgcatgtcacctgtcaagagaggaagagagaaagtggagggagtgctaggctatttatttatttagattttttgagatggagtcacactctgtcacccaggctggagtgcagtggcacagtctcagttcactgcaacctccacttcccaggttcaagtgattctcctgcctcagcctcccaagtagctgggactacaggtgtgcgtcaccacgcctagataactttcatatccaggatttcaccatgttcagcaggctggtcttgaactcctgacctcaagtgatccacccacctcagcctccctaagtgcagggtttacaggcatgctgttgcacttggcctgtttggtttcataaatactattacttcttttatttcttggatattttaattcagtttatttgaaagtccttttcagacagatgttttatcttcatatcgtcagatgtggatatttctctcccaatctccttttttttttttttaactctttatgatggcattgaactactttgcggacttagtgatttttgtttgagagcttatcttgcatgaacatttctctcttggcgaattttaactaccacctccactcctggttccagagtttatctttttggctaaaaggttaattacctgataatgtaattccaaaccagaagaccacgtgacatgcagacttgggttccaaattactttaaagaagggttagggcattttataatatttcacatttctagtgctgctgcttatttcaatgagttatttaataggtgaaaggcgtatcttgtcatttcaatttgtgttccttttattaatagtaggacacttttctagaattgcctctgtgtttccctcataaatgattgccgggtaaaacaacagccattttataatgctcatgggttctgtggtcaggaattcggaatgggcatggcaggagggtttgcctttattccacactgtccagggcctcagacagggagacgtgagggctggcattaactaagtgggggcagtgatctgaggactcaggcacgttctggcagttgatgctggcttttggctgggacctcagctgggactcttgtccgaaatgtcctggtatcctttccatgtggctgcttccccacagcgtcatggctgggcttcaaatgtgagcgtccaagaccacagatcctgagtatgtggccttttcgtaatgtcactttagaagtctcacagcaccacttctgggtgggttatgagcccacccaggttcacaggaaaggatcatagagcccacctcttggcaggaggcagagtcgcattgtaagaagagcctgtgtgttgggagatgttgccatggtcttctgagggaaatgtcatctgacaagttgggaaaatactattgtgttccgttattagctggtatgggaatttttagaacattttaattgtttttacaataaaggttgagacaagattttaaaatttaatcccctcgagtaaggtttactacaaattcatattccataaaaatttaacatattaagattttataatggtatttgcttttattatattcctttttatcctattttctattaatatcactttttggtgtagcttttttattaccatttttattttgcagacaaagctgtaaaatgtaatatggattcattgagagattcacctaaagacaaatctgaaaagaaacaccattgcatctctttaaaagatacaaataaggttgtattttaaaaatgttctttaaatacaaagttcatatagtgttaattttcaaattttctcttttgaaatctatctgaaaccaaaaatatgttttctattaaaaaatcattggccatgatagtttccttcatgagaaaatatagtttgcttgtttgcttattttgaaaggagaaagtagctccagcttcttcatgtcgagctcttgttctcggcctagttttctttctacaaaattggatattgatcctccttttaatgaaggtgtgaaaatctgggattccagggcattgtcctagtgaagtgcaagtctaatctgctctccgtccctttgacaagacaggttgaaagtaattgcaggacattttaagtactgacgatctggaatgccagctgcctgccatttggacatttaatgtagtggttatagcgctggcataatcacccaactttccagttttttatctctctatctctgtgtgtgcatgaaagatgtctgggatggttgttcatgagaataactcccatggaattttggttccaaaagaatgtatattatgttgctagcatacacattctttctgaagaaaagttttcttttacagcgtgttgaatcctcagtgtactggccagcaaaaagaggcataaccatatatgctgatccagatgtaccagaagcaaggtatgatttgaaaattcaaactgggtgtggtggcgcctgcctgtagtcccagctactggggaggctgagctggggggatcgcttaagcccaggaggtcgaggcttcagtgagctatgatcgtaccactgtactccagcctgggtgacagagtgagactcttatctctaaaataataataataataattcggtgtaattgacaagagacttaagagtgatgttgtcttatacagtgttctataagattgatgattggaaaatagtccattttcaaagagtggcccaggaaattttggttaaacatattaacttaaaggaaaaatgtgacacctggttggcagcaaagttgactgaaaactggtagtggccctagagtctgtctcctctttgcctttttggacagagttgtccctgtaaggcaggtctgaagattggcacagagtggtcctgatgagagggatggcctcacgtggccagatggcagcacagggtgggtggttacccagggcggaaagagaagaatggtttcgtgagtatcagaggctgggtctgtactttgtcctcttcaagatacatgtcagtgacgttaacaaaattgcagaaaggatgtaatgttgtaccacttcttgaatggtctaagaacacacttcccctcgtgtcgtggactttatgctgtggttgtcatatgttgtacttttacatatatcataaatgctagactctatctcacttttatttaaatagtcaattatattctagagagagttaactaacaaaaatatcttctctctttacctgtgtggttgcattggtgttctttactttttgtgtagctccatatttccatctggtattattttccttccacctaagggcttcctttaatatttcttgcattgcaggtctgctgttgatgaactctttcagcttttttttttttaaaagtattcattttaggttcattttgaaaaggatacctttgctaggtgtagaattctaggttgacagcactttatttaaagatgttgtcccactgtcttctctcttgcattgttcccagcactgcctctgctgtcaccagtgcctttgttcctctgctgtttcctctgactgcttttcagattttcttttgattactggttttagcaatttaattatgatatactggccaggcatggtggctcacgcctgtattcctagcactttgggaggccaaggtgggcagacctcacccgaggtcaggagttcaagaccagcctggccaacatggtgaaaccccatctctactgaaaataaaaaaaagttagctgggcgtggtggcaggtgcctgtaatctcagctactcgggaggcagaggcatgataattgcttgaacccaggaggcggggtttgcagtgagctgagatcacaccactgcactccagcctgggcaacagaacaagactccgtttcaaaaaaaaaaaaatcataatataccttgctgtcgttgctaccatatttcttatgcttggggttcattaatgttctttgtttgtagctttcttacatcaaatagtcattatgtctacaaatatttttttctgcaccaatctttttcctctccttttagagactctgatgaaacaaatgtcagatattttgatattgtccaaaaagtccctgaggctctgttcattttttcagcctttcaatcttgctattctgcagatcaatgattctactgatctgtctgtacattcattatcttctgtcatccacattctgctattgagcccatcctgtgagtattctatttattatatctatatttttttgcgacaggatcttgctctgttactcaggctctcaagtgcagtggagcaatcataactcactatagccttaaactcctgggcttaagcgatcctccggccccagcctcccaagtggctaggactgcaggcatacaccaccacagctggctaacattttaatttttttgcagagatggaagtctcgctatgttgccctggctggtctccaactcctgagaccaagtgatcctcccgccttggcttaccaaaatattaggattacaggtgtgagccactgtgcccggcctatatttcttgtttctaaaattttccttgtttttttttttcaaaagtttatatttctttgctgagaacttgtgtgtttccacttgggagtgctggccttttcttcttgtggagtgagtgtccagagattgccaccctgagccaccagaggttggcacctgctgattgtcgtttcccttggcagtcgatctggttttcctgggcccgtgtgtgctgagtaactttggactcactctggatattttgaatgttatgttgcgagattctggtttctgttaacattctctagagagtgttggttggtgtcatttgtcttagcaggaggtcggtacctccatgaggtccggccctcatgttctgccttgcgaactgtgggtggcggtggccgtgtgagctcaggctctgggccctcgatgctgcctggggcctgttctgcatctgcttagcttggggcgagttggggcttgtgttgggtcatgaaccacctctctttcttttcagaatttccctcacagttaccaatttctagggcctccttccccgtattcctctggccagatagtttctcttggagacattggtgtgcagtaatgtggaattgggataccttgagaataaaacaagtaagggagaaaaaaggtggagattttcctcacgcagtctttggaccacagctcccatctcccagttcctctggcttcaggtgcaggttttctctcagggtttaaggtcaccacactgctgttgctgttgctgggtgcagccccaagatcagagctggccttggggcccggtgaggaaagaaaagaaaaacaatggggattccccacactttctggtttaaagggcgcctcttcccgcttctctggcttgaaggaagaagtctctcctggagattctggcgtctgcacctgccacaaagtcatcttgaggtcaacacagagacacagagagaaaaaagacaagaaagtcctggtgattctgtttttcaagtgtttgacttctctcccctgctgttggggcctcatccagaatctctagttgtgatcagcaggagagagaggctgtggcaggcctactccatcctgtccagcaccaccaccagaagtgtcagaaatgacttttatacttaaaggactaagctccagttctcacagaaatgtgcttatgtagataaaccaattcctcagtggtgcttcttaaatttttaatccagaaaataaagatattttcaggattggggtaaaggggttcacaatttttcatttttttaagagacagggtcttgctcttgttgcccaggctggagtgcggtggcacaatcacagctcactgcagtgtccaactcttgagcttaggcgatcctcccaccttggcctcccgagttgctgggactataggtgcacaccaccatgcccggcattttttatttttttatttttgtcgagatggggactcactgtgttgcccaggctgctgttcacaaattttaatgaatttttttttttcatttctagtgctttaagtcagaagtcaaatgagaaacctcttagattgactgagaagaaagaatatgatgagaagaatagctgtgtgaagtaagaattttttccttggcctgaattgtgtattgaaataattataataaaattataaacaagagaaatctacacattttattattaatttcaaacctgcattcccatcaaaaaataaatgtacagtatatctcctgtagggtttgaggttaatttttgcttttccatccacttgggcacatttttctgtttaaagctttgttccagtgtaagtagtcattttctaccttgccttctggattctcttggtgaagtgaacagtgtcacaaatcaaattagatacagttgatcttttggggctgttgatgttctttgggttggtctttgctttctttccagttctctgaggcaacactgctagagaaactgagcagtttgccttgatttcatacttgtgtaatctgtaaaatatttacatagcaattttcgttttgagacaaggtcttcctctgtcatttaggctggagtgcagtggtgcagtcacagctcactgcagcttcgacctcctaggctcaagcgatcctcccacctcagcctcccaagtagctgggaccataggcatgcaccaccataactgatttacatatatatatatatatatatatatatatatatatatatatatatattttttttttttttttttttttttttttttttttgtaggacgagggtctcgctatgttacccaggctggtctcaaagtcctggcctcaaatgattctcctacctctgcctttcagagtgctgggattgcaggcatgaccacagcttccagcctcatgccatttttatactttttaccatattggcctcaacagttttacattccaagtaactgtagctgccctggagctcccagagtgacaaagtgtgagacaggtcagaggtggggaggtcctgctgtttccactggttggccttgggggttggagccagggtgtggactctgcagccatgtgggcttcccagcttcccagaggccatgctgatgacctgccagggcttcttaccccacaggacaccacccaggatttcaagggtgaggctttgaaagcttccacgagcccacagagttggggatggctgttgatgcacctaactgacacccccctcccagggcaacctcagccctaatacccaaaggttttgctgtcacagtcgttattttccttggaacagaaggccatacagcttatttctttcttttattattttcaattataacctggcaaattaaccctggaatattctttttttcattatttatttatttattttttaattggagacggaatcttgctctgtcacccaggatagagtgcaatgacatgatcttggctcactgcaacctccacctcctgggttcaagcaattctcctgcctcagcctcctgagtagctggaattacaggcgcctgccaccacgtccagctaatttttgtatttttagtagagatggggttttgccatgttggccaggctggtctcgaactcatgacctcaggtgatccgcccaccttggcttcccaaagtgctaggattacaggagtgagccactgtgcccggatgaccctggaacattctattcccttttattttcgtattaaaaagttctgtcttgtctcctgttctgttaaaatgccctttacttagaacccactgattaaacaacatcagttatcctgtcagtctcctgtgggtttcagggaactttgaggtaattcaggattaaacatcaaagaaggctttgagttccttagggacacagggatgacctggtgatcctgggaccctcccccttgactgcgcagaggtccagcattggctgcactgcgtccaaagcctggggaaccctgtgctgtcatttctggcgagatagccaaggcagcctggaggagaggcaccctttccttaaggatggccagtcagagacccgcattgccgcatccccaaacctcacttgggactatgataacgactgtcacaatgtgggcagaggggcacagggaccttggctcattgccaggggccaggtgtcccactagcctcctctgtgtgacacctgtggttttcttttcctgtctttttgtctcgctgatggagttgctcaagcctgtaagtaccagtaagcggttgtatttctttctcctcgggcctgttccttcatataactcatttggaaacccccaagttacagtacattctggaagaggtcaccccagatgcagtctttcccattccaggatcacataccaccaggatccccttgggaatcctggatacttgggtagcagaggaagtggcggggcccacacccaggtttaagggctctcctagtgaaattctctctcttaatttttgggtgttcaagagaaactgctctgttttgctaagggcttctggaggtggcaaggcagcctggattgggctgagatcgtgtttctaagctggtgccagcttccgcccagcccgtggaaatatgctaggtggtgggtgagtctcaactctgtgtgttgaccctcgcagcattattttcaggaggcttttggactttgacaatgcagccatatgtgctgcggggagtactttcataactggttaagatgtcctgagcataggagggtggagtggtacctgcttgccactcacgtcatctctgatatttaatgtaccctggagctctctctgcagttctttgtctttccttcttctgtgtccctcttgcctactgtgatattcattctttattcttctgttgtcttcctttaaacattttaacatcagcctactttgtactgcccactgattgaagatggaaaattctccgaatatgcccattctttttttcttttctttttttttttttttttgagacagagtctcgctctgtagcccaggcttgagtgcagcggtacaatctcgccttgctgcaacctccgcctctcgggttcaagcgattctcctgcctcagcctcccgagtagctgggattacaggcgcatgccaccatgcccagctaacttttttgtatttttaatagagacggggtttcgccatgatggccaggctggtctcgaactcctgacctcaggtgatctgcctgccattagcttcccaaagtgctgggattacaggcatgagccactgcacctggcccaaatatgcacattctttgtgataccatttcaatgtcagagtctgaacagcaatgcatgtcgaagcctggactgaaatgcccttcacacaaactgctgagtccagggtcagacactgtccttccagacccgagccctctgccaaagaacacagtgagtggtgagaacgcagctctgttgtacaacccttcctcctccctcttgaaatcacacccacacgtctgttcttcccatgactccactctccccacgtcatgattctggtgagatgagtgttcattgtccctgggctgtgagcaggtgagtgctgcggagctctgcagtcacacagcacggctgcttctctgttttcacatagccttttggtttacctgaagttaataattatcttgtttttttctttccttgggtttttttttttttaatggggtctcactgtgttgcctaggctggtctcaaacttctggcctcaagcaatcctcctgcctcaacctcccgagtagctgggactactgtctgccaccatgcctggctcacttccctaagtttttaatctatcttttttttttttttttgagatggagtctcgctctgttgcccagcctggagtgcagtggcgcgatctcagctcactgcaagctccacctcctgggttcacgccattctcctgcctcagcctcccaagtagctggggctacaggcacccaccatcacgcctggctaatttttttgtatttttagtagagacggggtttcaccgtgttagccaggatggtctctatctcctgacctcaagatctgcctgcctcggcctcccaagtgctgggattacaggcgtgagccaccgcgctcggccatttttaatctatcttaaagattcatccccagaattctcctctgttatctaaactcaggttctcacttgtgtgtctttggacatccctccagaccctttctgcctgctttggtttgtgcctgatatgtcccgtgttcattgtcaccaacatcctgagattctctgcatctttcttgaattgaatctcctcttttccagatcatccatcttcttcttacttggtttactcccttgttttggtggagagcatcctttagtagctttctaggaagggagacacaaaacataaattttttagagactttgcataaatgcttttagattatcttcacacttgatcaatagtttgggtatacattttgaagacatttctacttctagtttctagtgtagagacgtccactctattctgatttcttattctttatatatgactcctttccttttctctctctctctctctctctctctggaagcttataggatcttcctttgttgccggtgtttggaagtttcctgatgttgtgccttggtgtggttctattattatgcttgtcattcagtggacacttccagtgtgtagcctcatgtcccttacccctgggaaattctcttgactttttcgttgttctcttgtgctgcgtgttctctgtcttcttttaagaacctctgtgactcgtatgttgaacctcctgaattggttgagtaattttataaaatatatttttcttttttttttattatacttaaagttctgggttacatgtgcggaatgtgcagttttgttacataagtgtacatgtgccatggtggtttgctgcacccatcaacctgtcacctacattaggtatttctcctattgttatccctcccctagccccccaccccccacaggccccagtgtgtgatgttctcttccctgtatccatgcgttctcattgttcagctcccacttaggagtgagaacatgcagtgtttggttttctgatcttgtgatagtttgctgagaatgatggtttccagcttcatccctgtccctgcaaaggacatgaactcatccttttttatggctgcatagtattccatggtgtatatgtgccacattttcttaatccagtctatcattgatggacatttgggttggttccaagtctttactattgtgagtagtgccacagtaaacatacatgtgcatgtgtctttattgtagaatgatttataatcctttgggtatatgccaagtaatgggaatgctgggtcaaatggtatttctggttctagatccttgaggaatcaccacactgtcttccatgatggttgaactaatttacattcccaccaacagtataaaagcattcctgtttttccacatcctctccagcgtctgttgtttcctgactttttaatgatcgccattctaactggcatgagatggtatcccattgtggttttgatttgcatttctctaatgaccagtgatgatgagcattttttcatatgtctattggctacataaatgccttcttttgagaagtgtctgttcatgtcctttgcccactttttgatggggttgtttgcttttttcctgtaaatttgtttaagttctttgtagattttggatattagccctttgccagatgaatagattgcaaaaatgttctaccattctgtaggctgttcattatgatgatagtttcttttgctgcgcagaagctctttagtttaattagattctatttgtcaattttgacttttgttgccattgcttttggtgttttagacatgaagtctttgcccatgcttgtgtcctgaatggtattgccctggttttcttctaggatttttatggtcctaggtcttgtgtttaagtctttgatccatcttgagtctatttttgtgtaaggtgtaaggaaggggtccagtttcagttttctgcatatggctagccagttttcccaacaccatttattaaatagagaatcttttccccattgcttgtgtgtgtcaggtttgtcaaagataagatggcggtagatgtgtggcgttatttctgaggcctgtgttctgttccattggtctatatatctgttttggtaccagtgccatgctgttttggttaccgtagccttgtagtaaagtttgaagtcaggtagcgtgatgcctccagctttgttcttcttccccaagattgtcttggctatgtgggctcatttttggttccatatgaagtttaaagtagttttctccaattctgtgaaaaaagtcagtggtagcttgatggggataggtttgactctataaattactttgggcagtaagaccattttcacgatatcgattcttctgatccatgagcatggaatgtttttccatttgtttgtgtcctctcttattttcttgagcagtggtttgtagttctccttgaagaggtccttcacatcccttgtaagttgtattcctaggtattttattctcttagtagcaattgtgaatgggagttcactcatgattggactctgtttgtctgttattggtgtataggaatgcttgtgatttttacacattgattttatatcctgagactttgctgaagttgcttatcagcttaaggaaattttgggctgagatgatggggttttctaaatatgcaatcatgtcatctgcaaacaggggcaatttgacttcctctcttcctatttgaatacctttattgctttctcttgcctgattgccctggccagatactgccctttctcttgcctgattgccctgcctttccaatactatgtcaaataggagtggtgagagagggcatccttgtcttgtgccagttttcaaagggaatgcttccagtttttgcccattcagcatgatattggctgtgggtttgtcataaatacctattatgttgagttacattccatcgatacctagtttattgagagtttttagcatgaaaggctgttgaattttgtcgaaggccttttctgcatctgttgagatagtcatgtggtttttgttgttggttctgtttatgtgatggattacatttattgatttgcgtatgttgaaccagcctttcatcccagggatgaagccgacttgatcatggtggataagctttttgatgtgctgctggattcggtttgccagtattttattgaggatttttgcattgatgttcatcagggaaattggcctaaaattctttttttgttgtgactctgccaggctttggtgtcaggatgatgctggcctcataaaatgagttaggaaggattccctctttttctgttgattggaatagtttcagaaggaatggtaccagctgctctttctacctctggtagaattcggctgtgaatctgtctgttcctggaattttttttggttggcaggctattacagcctcaatttcagaacctgttactggtctattcagagattcgacttcttcctggtttagtcttgggagggtgtatgtgtccaggagtttatccatttcttctagattttctagtttatttgcataggtgtttatagtattctctgatggtagtttgtatttctgtgggatcagtggtgatatcccctttatcattttttattgtgtctatttgattcttctctcttttcttctttattagtcttgctagtggtttatctattttgttgatcttttcaaaaaaccagctcctagattcattgatttttttgaagggttttctgtgtcactatctccttcagttctgctctgatcttagttatttcttgtcttctgccagcttttgaatttgtttgctcttgcttctctagttctcttaattgtgatgttagggtgtcagttttagatctctcctgctttcccttgtgggcatttagtgctataatgtgtcccagagattctgatgctttgtgtctttgttctcattggtttcaaagaacatctttatttctgccttcatttcattatgtatccagtagtcattcaggagcaggttgttcagcttccatgtagttgtgcggttttgagtgagattcttaatcctgagttctaatttgattgcactctggtctgagagacagtttgttgtgatttctgttattttacatttgctgaggagtgttttacttccaattatgtggtcaattttagaataagtgtgatgtggtgctgagaagaatgtatattctgttgatttggtgtggagagttctgtagatgtctattaggtctgcttggtccagagctgagttcaagtcccggatatccttgttaattttctgtctcgttgatctgtctaatatagacagtggggtgttaaagtctcccatttattattgtgtgggagtctagatctctttgtaggtctcttaagaacttgctttatgaatctagttagctcttcttgttgaattgataacctttactattatgtaatggccttctttatgtcttttgatctttgttggtttaaagtctgttttagcagaggccaggattgcaacccctgcttttttttttgctttccatttgcttagtagatcttcctccatccctttattttgggcctatgtgtgtctttgcacgtgagatgggtctcctgaatacagcacactgatgggtcttgactctttatccaatttgccagtctgtgtcttttaattgggggcatttaggccatttacatttaaggttaatattgtatgtgtgaatttgatcctgtcattatgatgctagctggttattttgcccattaattgatgtagtttcttcatagtgtcaatggtctttacaatttggcatgtttttgcagtggctggtaccgattgttcctatccatgtttagtacttccttcaggagctcttggaaggcaggcctggtggtgacaaaatctctcagcatttgtttgtctgtaagggattttatttcttctttacttatgaagcttaatttggctggatatgaaattctgggttgaaaattcttttcaagaatgttgaatattggcccccactctcttctggcttatagtttctgcagagagatccactgttagtctgctgggcttccctttgtgggtaacctgacctttctctctgggtgcccttaacatttttgctttcatttcaaccttgtgaatctgacaattgtgtgtcttggggttgctcttctcgaaagtatctttgtagtgttctctgtatttcctgaatttgaatgttggcctgccttgctaggttggggaagttctcctggataatatcctgaagaatgttttctaacttggcaccattctccccgttgctttcaggtacaccaatcaaacatagatttggtcttttcacatagtcccatatttcttggaggctttgttcatttctttttactcttttttctctaatcttgtcttatcactttatttcattaatttgaccttcaatcactgatatcctttcttccacttgatcgaattggctgttgaagcttgtgcatgcatcacgaagttcccgtactgtggttttcagctccatcaggtcatttaagctcttctctacactggttattctagttagccattcatctgaccttttttcaaggtttttagcttccttacgatgggttagaacatgcttcttcagctcagagaagtttgttattactgaccttctgaagcttacttctgtcaactcatcaaactcattctccatccagttttgttctgttgctggcgaggagttgtgttcctttggaggagaagagacgttctggtttttggaattttcagcctttttgctctggtttctccccatctttgtggttttatctacctttggtctttgatgttggtgagctacagatgaggttttggtgtagatgtcctttttgttgatgttgatgctattcctttctgtttggtagttttccttctaacagacaggcccctcagctgcagctctgttggagtttgctggaggtccaccccacaccctgtttccctgggcagaggctgcagaacagcaaatattgctgcctgatccttcctctggaagcttcatcccagagggacacccacctgtatgaggtgtctgtcggcccctactgggagatgtctcccagtcaggctacacatgagtcagagacccacttgaggaggcagtctgtccattatcagagctcaggtgctgtgctgggagaaccactgctctcttcatagctgtcaggcagggacgtttaagtctggagaagctgtctgctgcctttgggtcagatatgccatgcccccagaggtggaatctggagaggcagtaggccttgctgagctgcggtgggctccacccagtttgagcttccccgctgctttgtttacactgtgagcatagaaccgcctactcaacctcagcaatggtggacacccctccccacaccaagctcccgcatcccaggtcgatctcagactgctgtgctagcatcgagcaaggatctgtgggcgtgggacccgccgagccaggcacaggagggaatctcctggtctgctggttgtgaagactgggaaaagcgcagtatttgggcaggagtatactgctcctccaggtacagtcagtcatggcttcccttggctaggaaagggaaacctttccccttgtgcttcccaggtggggcgacactccaccctgcttcagctcaccctccacgggctgcacccactgtccaaccagtcccagtgagatgaaccaggtacctcagttggaaatgcagaaatcacccatcttctgcattgatcttgctgagagctatagactggagctgttcctatttggccatcttgaaagtgcctgctctttttttaatctctttgtctttttgctttacttttttttttctttttttttgtttttttgaaatggagtctcgctcttttgcccaggctggagtgcagtggtgcgatgtcggctcactgcagcttctgcctcctgggttcaagtgattctcctgcctcagtctgggattacaggtgcctgccaccacacctgactgatttttgtatttttagtagagacagggtttcactatattggccaggctggtctcaaactcctgacctcaagtgatctgcctgcctcggcctcccaaaaggctgggattataggtgtgagccaccacacccagcctgctttactttttggaatgattttacaattttgtcctctactcattttattgtgttttttatttctaatatcacgtttttaatttgcaagggttttccttttgttctcttttctcttttctttttctgacagtgtcctgtcctcgtttcacatatatggtagtttctctcatttctctaaggagactaatgatttttgtgggggagttttcttctccctacactgtttctttttttgcagggtgcattactcggtttttaaggctggaggctttccttagatgtcatgcagtccttgattgtctgcctgtatttcaacgtagaggcccagtgagccggtgagggtctctgagtgtgccaagcctgtgggctgtgggtctctctggggagcgagctgctgtgagtacagggacctctgaattccgtccagatgcccaagggaaggcttctcctgtctctggcccctggggctaaagacctgcctgtgtcctgggagctgagtgggaggcacaggctgggtctcactgtcctgtgtgtgcttagcctccttcttttcagttcagcacctctgtttgcagctaggcctacagccccgagtcctgagagttctgctttatcctctccagagaatcagcccctggccttcctcgggttggggtgagtggccgtctggtgtggagtagtgtaaggtgatgcagaggttcccccctctgccacattgctgcagccagggagcctgcccctaattcctaagctttctgaaggttgttctctgcagatagggtcaggcctcccgcggctggctcagggtcaactgtcttggggctgttaccagtttgtccatctgttttttagcttccaacattctgttctggaatattgtctctaaaacatagcttttttgaaatatgattcatgtacccttttttcaagtgtacaattcagtgatttttagtgtattcacagagtttgcaaccacacaagtaagtgcatacccattagcggtcaccctccattttcctccctccacatcctttggtagccagctgtctgctttcagtctctatgggtttgcctgttcaggacatttcatatcgatgggctcatacggtgggtgggccttggtgacgctggtttcactgcacagtgtttccaaggctcatctctgccatatcataaactagcacagcatgccttttcatgactgacttatattccattgcgtgcatggagtgcatttcatgtacccattcatcagctgataacagttggatcttgtggcttttgcatttgaaaatccatttacagggccgggcgcagtggctcacgcctataatcccagcagtttgggaagccgaggcaggcggttcacctgaggtcaggagttcgagaccagcctggacaacaatggtgaaaccctgtctctactaaaaatacagaaattagctgggtgtggtggtggatgcctgtagtcccagctactcaggaggctgaggcaggagaatctcttgaacctgggaggcggatgttgcagtcagctgagatcacaccactgtactccagcctgagtaacaagagcgaaactccatctcaaaaaaaaaagaaaaaagaaaaaacgcgtttacaggaatgaggctttaggaaggagcgcagtttgccatgtgtgtaacccaccatctttatcctggagtccccgccatgtctgtgccttgtgacttctctgtgactgccactggccttacccatgttggggttgggctggatctagaggaaagcagtttcaaatttcttctcctctcagcagaggtgactgtggacaagtcctatctggtcttgttttctcatccataaaataaagatagtaaagtacactagtgattcctgagcttggctggggcccctcagatactctcagggggacctgggtggcagggttgtggcagcacaggtacaggccctcatgtctcataaaccaagcagaacagaacaggcagcagttgtacagctgagccttgggctgtgcagcccctgctatctctgtcaaggaagaactaaaagaatagctcaactgaggaaacaaacacctttttcttcacattcttcttttaactatcttacagattactgcagtttttaaatcctgatcctttgagagctgacggaatctctgatctccagcaggtattacaggccctaaaaaaagtaaaataaaaagagagaaaaaactgtttattctttaaatccttctccttcctccctccagacttgagattagaagagaaactccttagatgggggacttaacctgaagacatccttttagaaacgatcgaatggattgttgcttctgagaaattgttccttgttttttggataataaacgatcttccttttggtagtttggtggttttttttttctttttttttaagtaagcatatatacccaggtgtttacattgaaatctatattttcttcatttctgtgaagttcttgatctcctgtgctgacgcctcagggcagacactggttgtctaatgcacacgttctctcagttgcagaagctgaagggcctgcagccgcccgtggtagtgctccggaacaagatcaagccctgcttaaccattgactcgtcgccgctgtcagcagacctgaagaaggtaaaagtgctcgtaaaactgaatttatcaagaatgccaactttttctaatagagaaggattttgaaataaatggctctaaggttgcattgtataatttctttgcttttgaaattctctttttatttgagattacaggcatgagccaccacactcggcctaatttctcatttattcttaaatccaagttagcttcttagaagtgagtgagtgattgttttgtgaggcagccgctgtgtaactgtgagccccttctgcagtcaggtttccaggatgcctgtggacagggctgtgggaggagcagcaggccaccagggcaattgtaatgcactccccgaccgttcttttcaaaattgtcttacacacatatggtttcatttggaaaattgatcatacgtgtttatctacttttttcctgattaaaaaaagttaaaaaaaaattttttttaagataggaagctaaaacaaccaggacaaatagcatgagagagaagtggacagattccacagtcttagaagatgaaagcaggagacagagtgtggctgcctcttcagggaaggagtgctttgcgagcgaggggagcgtgaaccaccagctctgtcttctgagcacccacagccagcttgtattgttctcagcagcaaggttggaggctctttttggagaaatttgaatggctctagagaaatgaccttcagatgatgctatttggaattctcccatgaacagggcctgcttgcctccctgcctttctgcagtgaggtgacactcatgtgatgacaagagtccccagagcctccagttgggcgttagtgtcttgctgtccaccatgaacagacatcagggatcatggacatttgaagaaagccttcaccttaaaaaaaaaaaaaaagaccaggctgggtgcattggctcacacctgtaatcctaacactgggaggccgaggcaggcagataacctgaggtcaagagtttgagaccagcctggccaacatggtgaaaccccgtctctactaaaaatacaaaaattcgccaggcatggtggtacatgcctgtagtcccagctacttgggaggctgaggcaggagaatcacttgaacctaggaggcagaggttgcagtgagctgagattgtgccactgaactccagcctgggcaatagagcaagactccgtctcaaaaaaaaaaagaccgaaacaaactctcaaggaaacaaacaatgcagtgaggaggagaaaatgttaaagaataaatatccccagagagaataaatatccccggagagaagacattgcatctctaacagcttactgttaaagggatgtaatgttttttctctctggggatattgaaaataggatattttaaaaaggaacaggcagaataaaagattcttggaaattcaaaatatagaaaaatgtaaaaatcactagtatgtttgagacataaaagagaagctaactcagaaagtagaggaaaaaggcaaagagacggaaataggaggaaaaatttttgagggtcagtttgaggtccggtttctgaaaaatgggatttctaggaagaatgaaggaagatgataggacattttctgaagattaacataggaacattttctggacctaatggacaagaatttccagattaagagggcctacccatcacaggcccagcacaactgctgaagaaagagattctgaagcatctaagttgagggaatctaaagattatgaaggcttcaagagagatgaaactggtcctacacactggaccaggaatcagaatggcttcagatgtctccacagtgcaccaaatgagcattgatgtcaaaattctgatgaggtcaggtgcggtggctcacgcctttaatcctagcactttgggaggctgaggcgcagattgcctgagctcaggagttcaagaccagcgtgggcaacatggtgaaatcctgtctctactaaaatacaaaaaattagctgggtgtggtggcatgtgcctatagtcccagtcgcttggtaggctgagacatgaaaatctcttgaacctgggaggcggaggttgcagtgagccaagatcgtgccactgcactccagcctgggcacagaacgagactctgtctacaataataataataataataataataattctgatgaaaagctctttccaaccagaggtccttactcaaactgtggatggagcgtgagggtagagtgaagacatttgcagacatacagagtcttaaaaaaacgtacttcccttccaacctttgtcaagaagatattaaaatatgttctctaccaaaacaaagaagtaacccgagaaagatgaccacatgggtttgcagacaaaaggtgatggtgaaggatgataccaggatagttgctcaataccaagtgcagagcatggcgggtcctgactgcagctagggctcaggactcgagaggacctcacagagctcatggtgccgatgagctcggccatttggaagatcctatccatgtgggtggagaactctattggaacatttgggttttagtgacagttacatagaaaaataagcaaataaaagtctatcttttaaaaagctttacaagtgaagctgatggactggcagtttattaggagaatgaggaggaaaagccacatctttgatccagtgaactttaagttcctgtcaatgggccatctattggatccttttaatttagaaaattaaagcaagaatcttttttttttttttttttgagtcggagttttgctcttgttgcccaggctggagtgcaatggcatgatctcggctcaccacaacctgtgcctcccgggttcaagtcattctcctgcctcagcctcctatgtagctaggattacaggtgcctgacaccacgcccggctaattttctatttttagtagagacggggtttctgcatcttggtcaggctggtcttgaactcccgacctcaggtgatctgctcgccttgacctcctaaagtgcagggattacagacatgagccactgtgcctggctttttttttttttttttttttttttttttttgagatggagtctcgctctgtcacccaggctggagtgcagtggcacagtcttggcttaccgcatcctctgcctcctgtgttcaagtgattctcctgccgcagcctccagagtagctgggattataggcatgcaccaccacacctggctaattttgtatttttggtagagatggggtttcaccatgttggccaggctggtctcggactcctgacctcaggtgatccacccacctcggcctcccaaagtgctgggattacaggcatgagccaccgtgccctgcctagcaagaatcttttaatgggagtcttaataggagaaaaagcaacagtcttttaataggaggttggtactgagaaaagatttggggaaacttaacaagttagggcttggaaaatactgggtttggcaatgtgtagtgctttttggggtgaaatgagccatgcaatggagtttttgttagttttctctaccttattttggtttctggttgtttctgttttgtaggctcttcaaagaaataagtttccgggccccagccacactgaatcttactcttggcctcccatagcgcgtggctgtgatgtggttgtcatttctcactgtgaaagcaaccctttgctctacctcctaccagtgttgacagttttgcaaacaggagcctgctacaagtcattaccaagtagaaatggagtaagtcaaagacagttttgcctcacaaccaaatgggttaaatatttattttaaaattatacacctcacctttgaggaaggtcgtctattactcagtttggttttcaaacttccaggccagaaactgtcctgtgggaaagtgtcctttcccattccaattactgatgctctcatactgattctcacctggagcctatagttgtgggccattggctgaggcttttagaaatggatatggaggccaggcacggtggctcacgcctgtaatcccagcactttgggaggccgaggcgagtggatcatctgaggtcaggagttcgagaccagcctggccaacatggtgaaaccctgtctctactaaaaacagaaaaattaggtgggcatggtggcatgcctgtaatcccagctacttgggaggctgaggcaggagaatcacttgaacctgggaggcgaaggttgcagtgagccgagattataccattgtgttccagcctggacaataagagcaaaactccatctcagaaaaaaaaaaaaaaaaagaaagaaaaagaaaaaatggatatcgagtgtgtaaaatgctgtcacagacctgagtctatctatccatcacagtagcagcatgagatgggcattgttctgaccatttcacggaggagaaaatgaggctcaggaagagttactggggtaaatttcccactgacagggctaggagtggggttgaagtctgagcttctgctgccttgtcccgtgctctgccagtcatttcctagctccccaccctgcttcataatccttcttaacttttcccatgtgggaaaacctcagaataactgtattaagtctgttctagcattgctataaatacctgaggctgggtaatttataaagaagagaggcttaactggctcatggttctgcaggctggagcggaagcatgatgctggcatctgctcggcttctgcggaagcctcaggaaactcacaatcattgcagaagtctaagggggagcaagtgtgacacatggctggagcaggagcaggagcaggggaggtgccacatacctttaaacactagatctcagaagaacagcaccaagaggacagtgctaacccattcatgagaaactgcccccatgagccaatcaccccccaccagcccccacctccaacactggggattacatttaacatgagatttgggtggggatgcagagctaaaccatttcactgagaaagaggtggtgggaaagagaggagcggtgtgaaggtaaatgatgcagggcatggccctgtgctgctggtttgtggctgttaggggcctgatgggtgtggaacctgcatctcggggcctggcactgagggtgctccagacggggctccaccagtgaaaaacagcagtaagaagacatagggttgcagttaggaaaaatactagctcatttttctaaccgtgccatgcagttttatgatttccctttagaaagttgcatctgttggccgggcgcagtggctcatgcctgtaatccagcactttgggacgccgaggcaggcggatcacgagatcgagatcgagactatcctggccaacatggtgaaaccctgtctctactaaaaatacaaaaattagctgggcgtggtggcacacgcctgtagttccagctactcgagaggctgaggcaggagaatcgcttgaacctgggaggcggaggttgcggtgaggcaagatcgcaccattgcactccagcctgggcaagaagagccaaactccatctcaaaaaaaaaaaaaagttgcatctgttattagcagctgatttagtcaaattaatggatatgtttctatctcccaaattacttagcagcagactaatgagaagcaactgatgagaagtcgcttatattgaggccgaacccaggctcagggcagaaggggatgtccaggtctcgtccctgtggcccccagctttctccacgcctccatggtcagcctgctttcaggcctgtgtctggaagctgggcccacctggatctgtatgaatgaaagaggagcctcagcttgtcttcagttactggagggtgtgtgtctggcaggcagtgcagcttcaggagttacctgtcggcttgcagagggcagggttcagaagatagtgtcctaaggaagagaggttcgtctttttttttttttttttgagatggagtctcgctctgtcacccaggctggagtgcagtggctccatctcggctcactgcaacctctgcctcccgggttcaagcaattctcctgtctcagcctcctgagtagctgggactacaggcacacactaccacgcctggctaatttttgtatttttagtagagatggggtttcaccatattggtcaggctggtctcacactcctgacctcgggtgatccacctgactcagcctcccaaagtgctaggattacaggcgtgagccactacacccagccagggttcgtcttttttaaggcccctttcaggaggcatttagttcattcttgtgcttaggatctgtgcaggggatgtggagccagactgcctgggttcaagtcctgttgctaccatgtattagctgtgcagccttgggtaactgacttcacctctctgtacctcaagttcctcacctctgaagtgaagcagtgacagcctctgccccataagagcatcttaagagctaaatgaatgcatacgtgtgaagtgcttcattgagactcagcaaatatgactcaatgtgtctaaatctgttttaatgaaattatatcgtcacttttctgacctgtatgatgattatagcagaaacttacggggtgctgcttctgtgcaaggagatgttcttgatgtttcatatggatgctgaattcctaactactgtctggagtcatttgaatttgtctgtcttcgcagcctctcgcagtcatcgtgtgccctgggtggaagaaggcccaatttatttttgaattattgggagaatatagcatgtcctccaggcctcttcatcctgtgctattaacaattgggctccataaagaggaagccaaaaatacaaagcttccaaggggctgtaagtatccttttcaagcggctataaaagttaaagtatccttttcactgtcttccctacagaagacagtggagcctggctgggcctgggtccacagtgacatggcttgtgtgatgacacactcacagtcactagtccagacctacttgtcagctcccgacggttttgattacgaaggcttgatcttgacttacgtctgcttcactgagaaaactatgtcacttcattcatttatcatctatttactgaacacttaaactgtttgttagatgctgggcatatggggttgactaggacagaaacagtgttttacttcattagaaggcatttctagaaagtatgtggactcttagcagaggaaatcttagaaaaacctgtggaaaattgaaaatgttcacttttttttttaaatgcaggtgatgtgattgttacgaccccatacagcctgctgaggcttctcgcctgtcagagcctgctgttcctcaggctctgccacctgatcctggatgaggtagaggtgctattcttggaagccaatgaacaggtgagcgtggcttaaggtcctcagcactcagaagagaggcgtgattaacatgctaactgatggcaggaaggaggaaaagtgtctggttggggaatacattggttaatctaaaaaaattttatgctttaacttctataattaagaagaaagaatggttatgtgaaatttccttcccagtgttagaattctttctgaagtgcaaacattctttcctagagatttcctaaaatacttaaaatttttctgattacagaagtaatgatttttattttagaaaatttaagacatggagaagagcacttgaaaaacccagcctgcacagccatagtttcagaagggatccctcttactattttggagtatttgcttctttttctttgaattcttgtgtttgtagatacatatagttaataacatcaggggtgtgttttacaggccattttgtagcctgcattgtgcagggcgcagcagcgtaagggccaccgcttcctgttccacagcctggtggttactggccatatagtattcagttctttggacatcacagaatttgttttacaactgtcttaatattggatattcaacataatttgtatacgtgtgtggctacagaacatgcatgctttttgcacctgtttcctttaggatgaattcctaggaagggattcatgggtcagaggctttgagctcttgtaaggcttttcttggaagcagtgtcacacagtcaccaagggtatgcacttgggagtaatgatggccccagttttgagtccaggctttgttactgactatgaggcggtgcagggttcttgaactcctctgaagtctcaggttctgatttttgtaaaactagtatctaggcatactgctctgtgcagcatcctttctgaaagcatgacctgatgtgcactcctgtcagccatgtgcaggctctccacacccctgccagagcaggcttgccccagttttctcctccagcctaactggccaacagtgggatcttgtcagcctaatttacatttccttgattattttttaggttgaacattaattcgtattgatcatttgtattcactctgagttgcttgttcacttccttttcttattttctgttggtaggatcatcttctgctaatcagtttttagaagtttttatgcaagaacattaatctcttgtttgtttgttatacatatttaccaagatattgcttatgctttagttttgtttataatggagattgtaggatatttattgactttaaacttgacattttctcctatttagtttttgcctttttttttttttttttttttttgagactgagtcccaccctcgtcgcccaggctggagtgcaatggcttgatcttggctcactgtaacctccacctcccgggttcaggcaattcttgtgcctcagcctcccgagtagctgggattacaggtgcacaccaccacacccagctaatttgttgtatctttagtagagatggggtttcaccatgttggccaggctggtcttgaattcctgacctcatgatccgcctgcctcagcctcccaaagtgctgggattacagacgtgagccaccacacctggccttttccttttatttttgaaagactttctccactctgagaacagaaaatatacaaacccttacattttatgttctgccacactagttcttactcttttgaaataaaaatgaaattaattatgctaatttttcagatgtttgctatattagataactttaaaaaaaatattgaagttgaagaaagggaatctgcaccacatcagattgttgcagttggagttcattggaacaaacatatagaacatctcatcaaagagttcatgaatgatccctacattgtgatcacagccatggaagaggctgctctctatggcaatgtccaacaggtaactttgtgtgtatgtgtatgtgtatgtgtgtgtgtgtgtgtatgtgttggtggggggctgatgaacacaagcaagtaacttttatttcatggcttagtattaaacaattacagctttgatttcatatataaattatgaatgaaatacaattatagttgaatatttaaatttatattgatttcctatacattcttttctattaaaatcccaacacctgtggaaagtggatctggagcacctaaaatattaaaaagtcacattgtttctgtgcttcattaccaggtagtacatctttgcctagaatgtgaaaaaacttcttctttactccaagctcttgattttattccaagtcaggcacaaaagaccttgatcttcacctgctctgtagctgaaacagaaatagtgtgtaaggtgagtccatctccatataaaaaatgttctgtttgtttcaactggtcgaatctcaagtcatcacaaaattactggggtggttgactctgtggcagggaagtaaagttttacaagtttaacatcaatcagaagaggaggtggggtcttctcacagagcatgcaggctgaggcctggatctggggaggagccaggtgcgggggcagggcttttcctctgcagcagcgttccccagggcagggcagtttcgtcttggtggagtattaaaagtatcaatttatagacatgacaacatcttctgtaccctctgtttaagaagattgaggtggctcatgcctgaatcctagccctttgggaggccaaggtaggaagattgctggaagccaggagttcaagaccagcctgggcaacatagtgaaaccctgtctctacgaaaaaaaaaaaaaagaagaagaaaaagaagattgagaagataacagtaaaagatatcatatagccaaaaaatcaaataaattggctaaagatttattcagttttattttgtacatattagtgctaaaacgtagaaatgaagccaactaccaaataaaagaattaatagtacatctagctttctgcagcagtcagctagaagtatagttatatggtactgtagtcaaccaggactttctagctgatgtgtctgtgtgtgtgtgtatgtgtgtttatacacacacacaagtatggctgtgttattttaaaaggaagcaaaatagtttcagcaaaatactgcttatttcacttgagcaagattttagacataaacaaccgaattttggaaatatatttcagtttataatcatctcattcttaagaattatgggatcagtgaggtagtgccctcacagataaattaaagtgctttacattgacaattattgatggaacggttggcttccagcctatatccctgactgtgacctggcctctttgatttcatctttaggtagtagaaagcagttcaatattttgcttgaagatgcataaagaaatgatttttaacttacaaaatgttttagaacagtggaagaagaagttaagttctggctctcaaattatattaggtaagtgttttaatttctacttctatttagtgaaggttgagctactaggaattctatctttaattcatttatatatctcatctccagatttctcattattccccaggtttactgagactttattagcaatgttaatttcaaaatgaaaaattaacctccactaagattttgatgttgaggtaaatctctcaggtcagtgggcagccaccattagtctagacattctccctagagttatagcttgaggatcactatcatatatatgatatatattatcatatatatatatgataatatatatcatatatatgatagtgatatatatgatagtgatcatatatatgatagtgatcatatatatgatagtgatatatatgatagtgatcatatatatgatcatatatatcatgatagtgatcctcaagctatatatatattcatgtatatgactatatacatatgactatatatagtcatgcatgattgctaaatttaatattaaaaatataaaagtcaaaatatatagaataagtgaaaaacatatgggccgcttggatttgtaataagagacatttttcaggctaagaaggagaccacttttctctggaatttaagcactgggctgtggcattttggggaaaaaaatggggaagaagtttctttgcatccaaaaaagtaaaatgtgatatggaaatgcactgcagtgtggccgtgggaactgccggttaaagtaagtgcggtaactccagcgcgtgtgacattgtcggactccctctctgcagccctcacagacgactgcgtcccactcttggccatcaccgatgccacgtgtgtgattcacttcagtttccctgcctcaccaaaagtttttggtggacgcctgtattgcatgtctgatcattttcacgctgaacaggtttggtgaatttttattctcttccatattccactggcatcttctgtgtcatgataagctcagagtccacaaggtttcctcagtcagactgggatagatgatccacttcctttattcacccccaattttcagggttctcctgcagaacagggagataagaaagccaaatctgtcttgctgctgacggagaaagatgcgagccatgcggtgggcgtcctgcgctacttggagcgagcggacgccaaggtccccgcagagctgtacgagttcaccgcaggagttctggaagccaaagaagataagaaagccggaaggcctctttgtccatatctgaaggcttttggtttttgcaagtgagccagtaatttgtttcttattaaactgatgtataacctgcagtaaggtgcacagctgttgcaatgtggtgaattgtcatgtatctagaagccaccacccactctgagggagcagtctgggggttccctcgcactcttccccacgtgccctcccctctgcagggctgtcagtgttgattaactttgcatgattttgaactccatagaaatggcatcgtggtatgttctctttcgtgtctggcttctttctctcagcctcatgtctgtgacattcgtctgtgttgttgtgtgtatctatggtttgttttatagctcagtgttctgttgtatggctgtatcacagtgtgtgtatccattctcctattgatgggcctgtgggtggtttccactatcaggctatgatgtttgaagctgttaggaacactcttggccatgtcttttgtggaaatgtgtacgcatttctcttgggtagacgctccagagggcaagtggcaggtcatggggtaggcatgcgtttaactcttccaaagcggctggccattttccggtctggtcagtactgtctgacagagcctgagttgtccccaaccctcaccagcgcttagtgttggtggaggtggagtggtaaaccattgtgatgttaatatgcatttccctaatgattaatgatgttgaatatcttttcataggcttgtgggacagttggccatcctctttttgtgaagtgcccgttgaggtcttttgaccagtttttacagggagtgtttatctttttcttcttggtttgtcggggggagtagcttatatatactcaacataagtactttgtgtgatgtgtgcactgagaatgtctcctccaagctgtggcttgcattttcactcttttaatactctgctgatgatgaacaggcatttttaattttgatgaagttttttttgttttttgagatggagtttcactctgttgcccaggctggagtgcagtggcgccatctcggctcactgcaagctccacctcccaggttcacgccattctcttgcctcagcctcccgagtagctgggactacaggcacctgccaccatgcccagctaattttttgtatttttagtagatatggggtttcaccatgttagccaggatggttttgatctcctgacctcgtgatctgcccgcctcggcctcccaaagtgctgagattacaggcgtgagccaccgcgcccagcctgatgactttgtgtgcttataggaaatatttgcctatcttggccaggtgcagtggctcacacctgtaatcccagcacttcgggaggccgaggcaggcagatcacaaggtcaagagatcgagaccatcctggccaacatggtgaaaccccgtctctactaaaaaatacaaaaattagctgggcgtggtggtgcgtgcctggagtcccagctacttgggaggctgaggcaggagaatcacttgaaccctggaggcagaggttgcagtgagctgagatcatgccactgcactccagcctggagacacagcaagattctgtctcaaaaaaaaaaaaaaaaattagctgggtgtggtggcacacacctgtaatcagttacataggaggctgaggcaggagaatcaattgaacctgggaagcggaggttgcagtaagccaagttcgcgccactgcactccagacggggtgacagagtgagagattgtgccactgaattccagcctggacaacagagcgagattccatctcaaaaaaaaaaaagttgtctatttcaaggtcatgaaggcattctcctatatttctagaagctttgtagttttagctttcacagttacacttataattcatattaaattagtttgtatgtatgaccaggtatggtggctcacacctataatcccagcgctttgggaggctgaagtgggaggatcacttgagctcaggagttcaagaccagcctgggcaacacacagagaccccgtctctttaaaatatatatatgtgtattatatatgttatatattatatatataacatatataatatatatatacacacacacacacacacacacatatatatatatataagccagctgtggtggcacatgtctgtagtcccagctactcaggagccttgggtagggggatcgcttgagcctgggaagtcaaggattcagtgagacgtgattgtgccactgcactccagcctgggtgatagaatgagaccctatgtccaaaaaaaagaaaaaagaaaaaaaaaatatgtgtgtaatatgagatctggggcaaggtttgatttttccatatggataatggtttgctccagcatcgtttatttaaaatatcattcggttctcactgcatgagtgcgtttgccatgagccaggtgatggtatttgtggtccatttttggactctattctgttactttggcctattggtctaactttataccagtattacactttgttatagcacgtcttaggagctggtgtatgagtcctccagctttggtcctcatcaaggttgtttggctattttaaatccattgcatctccacatacactttattttttttatcttttttttttttttttttttgagatggagtcttgctctgtcacccaggctggagtgcagtggcatgatctcggctcactgcaacctcctccttctgggttcaaacaattctcctgcctcagcttcctgagtaactgggactataggtgtgtgccaccatgcctggctaatttttgtatttttagtagagacggggtttcaccatgttggccaggctcatttcgaactcctgacctcagctgatccacctgcctcagcctcccaaagtgctgggattacaggcgtgagccaccgcacccggcctccacgtacattttagaatgagcctgttagtgtcttcagaaaccttgcagaattttgctagggagtgcattgattgtgttgatcagcttggagagcatgggtaccttgacagtcatggggcttctctgcctgatccagacgcaacaccactgcgtgatacacagacagctgaggctggggcatgggtgcctgatacgtagctgctggattgaatttaaagataactgttgacattaacgtttttgaattatggtacattaaatgtgttactagcagtattcctatttacgcttaaagaagaccgagtttttttttttttttttttaagacagtctctgtctggctctgtcacccaggctagagtgcaatggcgtgatctcagctcactgaaacctccgcctcccgtgttcaagcagttcttgtgcctcagcctcctgagaagctgggatcacaggcgtgaaccaccacacctggctaatttttgtatttttagtagagatggggttcgccatgttggccatgctggtctcaaacccctcacctcaagtgatccgccctcctcagcctcccacagtgctgggattacaggcatgagccaccgtccccagccaaatactgactttatttatttatttatttatttagagatggagtcttgctctgtcgcccaggctggggtgcagtggcaccatcttggctcactgcaacctctgcgtcctgggttcaagcgattctcctgcatcagcctcctgagtagctgggactataagtaggcacctgccaccatgcgcagctaatttttgtatttttagtagagacggggtttcaccatgttggccaggctggtctcgagctcctgacctcaggttatttgcctgtcttggcctcccaaagtgctgggattacaggcacgagccactgtgctcggcctcaaatactgacttttaaaacggcaatttcaactatttctcaacgtggaagcagcattgtagttaaggaacggcttctgggttagagatcgattgccctttgttgtgtattatggcaatgtatttctaattcagtctttattatggaaatacattttgttcatttacataatgcattttagaatgtctagagaaatagggtggctgagcagggaggatctcttgagcccaggagttaagaggctatggtgagacatgatcttgccactgcactccaggctgggcaacagagtgagaccaaactcttaaaaaaaaaaaaaaaaaaaaaaaaaaaaagaaagtttgctagagaaataatgaaataactcattaagtttattcagtgttaattaaaatgtaaaatccattttcacttatttgtatattattaatgtcatctgaaatatttaatgtggttattcagtctttagggtgtttggaataaaagttatctgatttaggttgcagattaattttctgaagaaagcgttaaaattcacattaacaattattacttacttatgataagtctagtcatttcattttcagagacaaaaggatctgtcctgaccgacaccgtattaatccagaaacggacttgcccaggaaactgtccagccaagccctaccttcatttggatacattaaagtaggtttggttaaagatgcttgtgtcctctgacgaatggtcatgttaataaacgtgttttatttgttaagcaggatcttagtagatgtcatggtgccttccagtgatcagtattaacataccaccattagtgcaaccagaggcacgtgtccttacaaggcgccttatttcagggccccagcgtatttataagccaagatcaaattcagtaatggatgacagtttaaggatttttttttcaattatattttcagaaaatgtttctatttgggggccattaaaaataatgcagtgactgggcacagtggctcacacctgtaatctcatcattttgggagactgaggtgagcagatcacttgaggccaggagttcaagaccagcctgggcaacatagtgagatcttgtctctacaaacagattttttaaaaaataatgatacagtgattacatgaatcttttcaagacattcatgataatttctttgaggaaaattctgtaataaggtgcagatagaattgccaagttaagaatttttttattttctttctaatccttttttattaatttattcatttctttttgagcatacaatttctctccctttcatctgtttcccttagagcagtatctgttgtgttaatttcctaggctgctgtaaaagattaccaccaagttagtgacttaaagccacacacatttcttctgacatgttcctggatgtcagggtgtcagcagggccatgcccctccacagcctccagaaggtgacctggcctgtggctcgcctggcgtccttgcatctccgccagcagccactgtcactctctctccacctgcatcttcacatgacctcctcttctctgtgccccttgtaaaggacgtttcattggagggagggcccacctagataacccagagccatctcccagtctgcagacttcactacctctgcaaagaccctgttttcaagtcaggtcaaagtcacagtgagcttgggggttaggacatggacatacctcttttgggagagtcaccacccaacccactacggttttcattattgaatttttaaaaaaatttctaactctttcctgcattctgtcacctcatttctaagttgttgtaattctgatctgttactcttttatacactcattgttttcttagttaacaaactgaaagcaacatttcttgaaggttatagttttgatctgtttgtggatgtatctttctaacaggtttcattgtctgtagggatggttcttctgctctttattctctttttaattattttatttttatatattattatacattttgttattttatgatgacttcatatcggatttgaccttgttactttgctattgctcatttttagatagaatttgttttcttgacattttggaggaggtgtgggtcagggtaacttttctgatttcacagagttcccatttctgttttttatgtgctgtgtaaaatgaatatggtgacatagtgtctgagatttctgagattccctggccctgttcccctcctgaactgttacctggttttctcttccttcatccctcctgtccctggagggacagtgtggagatttcacaggggctccagccttcacccactgtggaggcaggtgaagccttccaggctcgcttgttgcactggctgagcccgtttccagggagggcctcttgcctcttctagagctctctgttctcaggtctattgcttccctctgcttcctcctgcacaggcacagacactggtgcctgtgggtgtcgccagcccggtcctctcccctatcctgccaagtgcctacttctcactcctggcatctgctctgggcagccagggctccctcccttcacacagagcgtctctgccctctgcacactgactttttcctcacacacaggtccccctgcctactctaacctgtgaagggctgtcttctccagcacacacaagctgtggcctctctgtccacttctggattgcctaggtccctgtaggacagtttcatccctgtaaccctggaggctgatatacagtagctcttaataaaatgcatcttgttacctgaaaaaagatcagaaagtttcaagagacagcagtgctattttaagaagaatttctataaaagtgcagttagaaggtaaacaaggaacacttatacctaataatgaagttttaaaataatgaaatttgcaaaataaaaaaatcttccattagatttaaagtgaaactaattctttatgactgtgtgaggtattggttttgctttgcttttttggctagcttcctagttttttctaaatccacgttgctaagctttggtttcttaggttgggtactgatttctgcagatacagggaatgtgtacatatccggtttagactaagtttgtttcttggtcatgtttactatatatgtttcagataatacctttttatattttgaatgcaacaaattactttggccgtatagttgataaacacatggatctttatgcaactctcaatgctgaaatgaatgagtattttaaggattctaataaaacaactgtggaaaaggtggagaagtttggattgtatggattagcagaaaaaacgctttttcacaggtaacacatctgtttacttcatctgtaaagttttgaagcatgaggtaactaagtggtgttgagttccgattttgacctctgtccatttgactgagtgtgtatgtgagcctggtgacagcggggtgtccccccagatgcctgctccagttctttgtgggaaactcttccccaggctcctgagcccagtgacaccgtgacccattgagccatcactgcgtgcgacatacacatacatctttaactcacttaattcttgccaagttcctatcaagtgggcatcattcccattctacagataagaaaacagccttggcgatgttacgaatgtggtgtcaggtcagctcgatacctggcatagtttgttccaacctggtcagtctgaatcacatgctcgtttgtacccacttcccttgaatccacacctggcaccacttggtgatagccttgaattcagaaactttgaaacttgacaggtgacgttgctcatgcctgtaatcccaacactttgggaggctgaggtgaatggattgcttgagcccaggaggtcgaggctgcattgagctatgatcatgccactgcactccagccggggccacagagcaagaccttgtctctacaaaaaacaaacaaacaaaaaagacaaaaggaaaaaaataaaaaaactttgagactttaatttgctatgttaatttttattatgttgttagataaaaggatttactcttattcaaaagtacatgtttttatacttatgtatactttaaataatccaccacttgaatttttgaaggccttagttttttatttctagtatagagtaaaatcatggcgttttggagtctttttatatgttttccatttcatggtaatttgaggcaaagatgatcctttctggaatctctgcgttgaaccgatgccccattgctctccagggttcaggtgttggaagtgaaccaaaaagaagacgcctgggccctggatgacatccttgtagagttcatcgatgaaggcaggacggggctcgtcacaagggaccagctgctgcatctcccagaacatttccacacacttcccccgcaggctgtggagtttattgtctgtagggtgaaacctgctgacaacgaaatagaatggaatccgaaggtgggtgattttggctttttatctattgttgacttttagaatatatttaaccgagaatatacacagaattgaggcctgtctggatttacagtgtcacgtttgggcagggaaagtgcagtctgcttagatccccacggtgtgtgaacgtcccagctgaaccctcggagaggtaccaggcagctgcaacactgtcttcaccactgtccttgtgcttacggtcacagaatctgtataaagtagggatgttggtaaaataaactgcccctcagcctaagcaggggaagcacctacaaaagtgaacattccaggctgggtgctgtggcctgtaatctcaacactttgggaagccgagggatgaggatcccttgagcccaggaagttgaggctgcaatgatctatgatcgtgtcactgcattccagcccaggtgacagagtgagactctgtctcttaaaaaacaaagcaaatcaaaaaacagaaaaaaagtggaaaagtggaccctccagccaaagagggggcacaatgggcggtcccaggagaggccaggtgattccactggtgcagggacgatgggccaggaaggagagatggagatcagaaaagctgccaaaggaagggtcatttcctctgggcttcgtggggtaactagggtgtcaccaaatagaacagatggggcgttgaaagcaaagagaaccacttgtgctcaggcacaggcacagaagagggctccatgcgggctcacgtggccatccagctggagtgggaaggcccagcccttgcagacctgtgctgagggcacaggcacaggggggcccgcgtctcaggcactgtccaggtggggtgggaaggcccagcccttgcggccagggagaaacctgcagccagtcctgcccatcactggagcatgagtcgtgttgataagcgctccagttctccaaggaaaggttatattttgcataattcgacaaatgggacatgaaataagttaattgcaattggtaaagtacaaacagtttgggttataaacaaagttaaacattatccaggaaataaacaagtgaatgtttccatgatacaggataaatacacaaccttactcttctaagtttagtaaaaggagcctttatcacaaggcagtggcattccttctttgtaatgactgtctgctgtgtaccaggtgccctactgggttctggggatgtagccgtcagcaagaatgtcacagttctttccccaagaaacatctgacctgtaaagatgactgaccaaaagtatttcttgaaggagcagccttctgtgggaatggagaaaggttctcctgtgtacattcttctgaattaattcaccaagtgcaagggggatggaaacgggcaggtccctttcgccctgctttgttcatgtgaaaatgtgtgtgagaggttgcttagacaggtcctgcctgttgtgttcctccttgagaggaaactgccatggccaggcatggtggctcacacctataattccagtgctttgggagcccaagatgggaggattgcttaagcctgggagttcaagaccagcctgggcaatattgtgagacccccatctctaaaaaaaaaaaattaaaaattaaccaagtgtggtggtgcatgcctgtggtctcagctactggggaggctgagtaaggaggatcgctggcaccctggagttcgaggctgcagtgagctatgattgcgccactgcactccagcctgggtggaggagagagaccctgtctcaaagaaaaaaagaaagaaaacaacagccatttactcagcaaggggtacacaaagaccaggccctcagctccagtgtcactggctgcaaggcagctccattgcagtgacggccttggagcaggaggaacaactttcacttcactttcattgagctttcaaagaaataggcatccgtgctttaaagacagattggcaggtgatggaggagatggggtacgcacgtccacagaagaaaatgtacagtgttgggtcccaaaggcacagacccccgccttgagctctgggaactcactagtacgaggccatgggcgagttcctttccacacctgcctcactaaactctgctgttagccttgtggacgagagggggtgatgacctctgtgatctcatagcattactgtgaggctcaaatgaaatgcatggaatattttgcaaactgtatggcatatacaaaataaggtattttgttaaagcctcacctaaaataatgttaagtgcttttttcaggttactaggtacattcatcataaaattgttggaaaattgcatgatgcaaaagtgatcctggctttgggaaatacagtttggattgatccaatggtaagtacgcattttttcttagaaataaatttgtttgaatgggcggctaaaattatccagattattctaagccctcacttgaataactgctgcatagaaacggtgacttatttggggatttgttagggagaggtgtttttcatgttattgggtcatgaattgggttgtgggtttagtttttgttcaggggaatattttacattgtaaccccagcgcacacgtgcattgtgtatgcgaggcacacgcacgcacacacatgcagccgaacaaagctttgtgaggactccatgctacattctctgatgctgacagtttctaactttctcattcaccacgcacttaactgagcacctgccacgtgccaggagcagtgctgggcactggggttccttctgtgagcaaagcagacgaagcccccatcctgcagagcagccgtgggagggggcgggggaaagggggaggggaggacacatgacaaggacatgtgactcacgggcctccgtgtctctccacggctgctggcaccaccctccctgcttgttccccaagagctccactcctccactcaaagttctgctgtattagacttaaatcttactatgaatacttaccagatttaacagagtcaatttataaaaacttttgctgaatgttatttttatgaggttggaaaagttttaacatgttaaaagggagtttggatgtaaggtttaagactaagcagaaaatggttttcagaagagaaaatatggattacaaatgcaggtaaatgaggagatttgggcatcttagttgatgttgtgatagtattgtgtttgtttcttgttggggggagaaaagcagatattttattaagcagagatttaaaagagattgaagtaaaaaagaaagcccacctggcagatgtgtccacactgcagcacgtgtggcagtgaccacggcggccagagggaaacagacccaccctcaccatctccacccgttcctgcccccacccattttgagcagagagaggctcctccacacattccccggtggacacacattcctggggttcacctaggaaggggccccagccagggcaggcctggagcaccccccaccctcaccatgggagggacagcccctcctatacccacactgccaccaacagtgccaggctgttgcagatttttatgttttacttaattttgtataaatggaaatggatgaggatgtttggttgcagaaaagacgaacagaagaaatggcccagaacaggattcaggtccttggcttaggtccttcccatcaggcagacgctgagcctcaggaggtaaaagtagttgagaaggaatgagaaagatgtacgaattatgcatctgactaggggtttatcccagatttgcaatttggtcttgactaggggtttatcccagatttgctcttgccacccccccaccacctgcccatatttctgtggcatggggtgaggcctggatgatttggatggaacctcaggtaggaagcaatccagatgctgccatggaaagccctgcacgttgtggcaagcgccgaagtgcagccaacgtggcaggctgaatgaaccagagaggccctgtgggaatgtctatgcttcagttaaaattcagagtgattactgctaatgttcaattttttcattgattcaaggtgcacattacaaacctttccagtttaaaaacctctgtcattgattataatgttcgagctgaaattttgtccatgggcatgggcattgataatccagaacacatagaacaactgaaaaaattacgcgaagatgctaagataccagcttgtgaagaaagcctaagccagaccccgtaagtggatttctgtctcctttttggaagagttgttttttggaaatacaactcacaagtgttaaggacatgttttatgaaagtagaagagttggctgggtgcggtggctcacacctgtaatcccagcactttgggaggccaaggtgggcggctcacgaggtcaggagatcaagaccatcctggccaacatggtgaaaccccgtttttactaaaaatacaaaaattagctgggtgtggcagcacgtgcctgtaatccctgttactcgggaggctgaagcaggagaatcgcttgaacctgggaggcagaggttgcagcgagccaagatcatgccactgcactccagcctggcgacagagtgagactacgtctcaaaaaagaaaaaaaaaaaagtagaagggtttttaatgagtctccatgtacccatcactcagttgtaataatgaccaagattttggaaatctagttttatctataccccagcccacacttgcttttgttggagtattataaagcagatctcaaatatagtattttacctgtatttcttacagaaaggattgttgttaactttttcttgacaaataacgcacacacagaaaagtgcgcacatcagacgtgatgtgtttcctgaacatacctgtgtaaccagcccagatcaagaaacagagcctggctcagagcctcccctccctctaggtactccccctccccaagaggagccattctcctgatgtcgaaaagcagggatggttttccccagttttgcactttgtttgaaaggaattagacagtatgcctcctctccatagtgagttacagaagctaggctcaaaggaggcataaattctctaaattctcacagctacataatgttcctttgtatgaatataccattatttgtttacccattctactgttgactggggaaatttccagtttggggtacttcaggtaatggcgctttaaacattaccgtacatgtcttttacaaatatatacacttacaaatatatttctgacggaatgggattactgagtcatagttagagttactacccaatagtgttccaaagtggctgcgccagcgtctcctcccatggggggcattagagagactgtgacagtcactccgaggagggatcctggcagctccagagggggaaggatctgtatcaagaactccttccagccaggaggaaaacagcaggcacctgttaggaaagtgggcaaaagacctgagcagccacttcaggatacctaattaccatatgagaaggtgctggaactcctgagtcatcagggagatgcagatgaaagcccagggagtaacaccacagcatgcccagcccaccagagaggggaatgagagaaggaaggaaaacacgcaccaagtgtgggcagggatgagagtggcagggcttcccaaaacttgaccagagcactgttagcacagctaaaaaggctcacagtgattccttcaattgcatgtgttttatcgtggcaaaataaacatgacaacagctgccatttaaactctttttaagtgtacaattcagtggcatttaggacattctcagtgttgtgcaaccatcatcgctatccatctccagaacttgctcatcatctggacagaaactccatactccttaaataataattccagagtccaccccccgcccagccccctactctcctttgtctctacgaatctgccaatcctgggcactttaagtggaatcgtccactgtttacccttttgtgcctggctcgtctcagtgtaaggtcctcaaggtccacacgtgttgcagcccgggtcagatttccttccctttgaagctcatcctccatggcatggatcaccacgtttcacttctccattcatcttcctgcgcacacctgggctgctgcccctcttgactgtggtgagtgtgctcctgtgtatacaggtgtacaaatacctgtttgagcccctgccttcacttctctggggttgctactcagaagtggagctgctgggccctgtgggaatcctgtgtatgatttttggggaacctccatccaggttccgcagcagcttccccattgcctgttccagcagccatgcccgaggcctgcagttctccatgtcctctccttgaccccgcccgaggtgcaaactccaggtctcttcagggctcttccgggcgtgcctctgtgcgcttgtgcaattctaaatggcccgtacacacgactgcttttgaacatcctaattccccagtctcttgctctctgcgtctcctctggcccagcccacccaggcatcctagatctgtagggcctggtagctttagaagcaggcctctgtctcaaaaaaaaaaaaaaagtgtttttacccatgcactccaagctctgtcctctactgtccccagacaggctccacagatgcacatgattatttgcaaatgaagtctgctctgctttctccaggccgagggtgacagggaccagtcctgctcaagaccaggatcatccatccgaggagcagggggggcaggggtgagtaagaacaccacagagcttcctcccagaatgccagggacagggggccatgtgtgagggggacagtgcatggggacacctgggaggagtctccacgggccgagggaaggactgggctgtgagttccaggagcagggatgaaggtactcagagcggagcagaacacagagacccggaggtgctgggccaggtcttgtggggcctgtggccactgcaaggaatgggttcttgctccacagaggcaggagccatgagggggttttgagcagaggagtgacttgaacagaagatggttcgtggctactgtgttgagaacagactgaagggagggctaggggacaagactgtgccaggagcttaggacaggaggatggaggcttggaccaggtggctttgtggaggttgagaagctgctggtttatcagtgtgttctgctagagctgacggggctccaggcagcctgcatctgtggcaagagcacagccctcgtggcagggcctgggagccccagaggtgtgagaggaggggtccgggggtgagccctggtgcctccactggggagcatggagtagggtggggacgttgtagccagcaggtggagggaagcctggagaggtgagtaggcgagggatgcgtgtcccggacaggagtgatgagctagcccaggtgcagctgcagacccagcgagtgaggaccaagacagacagctgggctagtggcctgctggactagtgggctgctgggctagtgacttgctgggttagtggcctgctggactagtgacttgctggtttagtggcctgctgggttagtggttgttggtgaccttgagagattcctaagttcagctgaaaggaggatttaaaataatgtgggccaggcttggtggctcatgattgtaatcccagcactttgggaggccgaggcaggaggattgctcaagctcaggagttcgagaccagcctgggcaacatagcaagaccctgtctctactaaaaatacaaaaattagctgggtttggtggtacaagcctgtagttctagctacttgggacactgaggtgggaagattggttgagcccaggaggtttaggctgcagtgagctgtgattgtgccactgcactccagcctgggtgacagcaagaccttgtctcaaaaaaaaaaaaaatgacaaagataaacatagtatgatctaaagttttttagttttttaccttaataaaaatggatacctataggattagaatacagggtagtttccctctactttcaagaaaaaaaaaatttcccatacttttaagatacttttttagaaatgaagatgtcattaaactttagtagatttaaccaaaatgaggtttggtggcttatgggaagcactgactttgagccccagccctgtgtaaaggctcccacagccccctttcccactgtagctttgtggttaagggagcttaacatacccgtggtcacgaacacagagcatacagcactgcgaggtttcacagagagcctgctagaagagaccccatatcagacagctcctggagaacaggggatcctgacaggtagagagggaatggcgagaatatttcatgctgtgacccgcagatctggaagccacaggacttggcggttggcagatgttagggaacgtgggtctgcaggtctgagccctggtgcctggggaatgctggtgcggtggacagtgacaggtggtttccaggcacagcccacagcagaggaggagaggctgaggtgggctgtggaggtgccagtttttaaggttactgaaagtctacgcctagggctcaggaaagcagctggggaaggctcttggtttgctgctgtttgaggagagtcaaagctcagtgagtgtgaggaggaaggaatctacctagcagaggaggatctatcgaaggagaagagggtgggcgactgcacagagcctggggaggggcggtggctcaggacgctcgctgcctgaatctggaaagtgccacactgcaggcttcttctgggcccctcagaagacaggcacggacccctccttctcacaggtttgtgtgtgtggctgtcagaagacagcacacccctcctcctcgtgtgtgtgtgtttgctcatttaggcttgaattgtctcttcaaagatgtacaaaaactgagtcacattgtcacccacgaggaagggagctggctggctggggagcaggggtgagaggagcttttcagtgtacagccaaatttgacttcttttaaaatactgaaccacatgaatgtggttacctattcaaagaaccaaaagaatactaccatttaaaaattttaaaataagtattctagctagttattaagtaggataaaatatggggcagcacgttgaatttagtacgttcccatatgtttaaatgtgtgtatgtgtccatgtgttttagatagaaaggcatagaaggcaataatttcttttttatgcaaagaatatttctagaagtgggcccaaactggtaacaggggtggtctttgggaagatggccccagagactgggtcaggggaagcaggaaactggcttgtcactttctgtcctttggtcctgtttgaagtgggcagcagtgagtatggaaggcaaaccatcttggtgaagagtgaaggcctgcctggtcccatgtcagtcatgcactgtgtgcttgcccatcatccttgtcggaaggaacagagttgatgggctgcctggggcatcttaaatgtcataagctctacgtgggtctgactccacggccacaggcacttcacggtcatttattgcctgccttcctcttccacttgggcagttcctgtagagagccaggtgttaacccctgcctctcccgtctaggacgcctccagcagaagatgctgcttgcctgcagagcccccagcctgaggacacgggtgcagaaggaggggctgagtccaagacgagctcagaaaaccagaagcctggtgggtacttggtattcaaaagatggttaagttcaaatcgttaatgtctggaaaattgctaatgtttagactttctactttgagatgaaatgtagagaagatgacataaactgatatcacctaactgttcttatttttgacaggtcagcccccagtgttttgtttttgtagtttgaggtctaacttccatccagtgatgcgcacagatgttaagtgaacagctcagcagagtgtgtgtgtgtgtgtgtgtgtgtgtgtgtgtgtgtgtgtgcgtgtgaaccacacccacatcgagctgttgaacatttccaggaccccagcagtctcctgtccggaaccctcctgactgaccattctgatttctgacaccatgagttttgctgacttggaagcatatagaatacattcttttattttaaacagagatggagtctcactgtgtggcccagactgattttgaactcctggcctcaagtgatccttctgccttggcctctaagagtgttgggattataggcgtgagccactgtgccccgcctatagtatatgttcttgtggcttccttcagtcaacattatgtgtgtgaaattaatctgtatgattgcaagtggaggcattttttcttaatcttggaaagtatttgcatattgcatggctctctccagactttacatctaggctcacttttattgcacagcgcctcagcaaagaggaggagctggcgttaatagagttggctgacctcggccaggctaattgcacggacttagcagacatttctgacgtgtatgaacttggcactgagttaggtgccataaagaaaaaagataattagctgggcatggtgggggggcacctgtaattccagctactcaagaggctaaggtgggaggatcaattgaacccgggaggcagaggttgcagtgagccaagatcacaccactgcactccagcctggatgacagattgagactataaaaaacaaaaaacaaaaacaaaaacaaaactggttgggcacggtggctcatgcctatgatcccaacactttggggggctgaggcaggcaaatcacttgaggtcaggagtttgagaccagcctggccaacatgttggaaccccatctctactaaaaacacaaaaatattagccagctgtggtggcgcacgcctgtagtccctactacttgggaggctgaggcaatagaatctcttgaatccaggaggcggaggttgcagtgagccaagattgtaccactgcactcttgcctgggcaacagaatgagactccgtctcaaaataaataaataaacaaataatagataaacggggctgggtgcggtgtctcacgcctgtaatcccagcactttgggaggccaggacgggcagatcgtgaggtcaggagatcgagaccatcgtggctaacacggtgaaaccccgtctctactaaaaatacaaaaaattagccaggcgtggtggtgggcacctgtagtcccagctactcgggaggctgaggcaggagaagggtgtgaaccctggaggcagagcttgcagtgagccaagatcgcgccactgcactccagcctgggtgacagagcgagactccatctcaaaaaaaaaaagataaatgggacaaaacccaagccccttgtggaaggagaattcagtgagggagaaggaaaggagaggtgaggagaccatttgccgtcactggaatttatcttcgtgtggccttttaattttgatattcactgtctttatgaaatggagttagatcattgctccttgtcttgacaaatcttagaaattgcccagacaacatatattgataaactcatcccatgactagacaaagtctccaacactccagtgctgggagctccagctttccacactgcagatgttctgcacctctgctgtggtccctcattccgcttcccaggagggcgggataagatcctgggagggtggaccctgcatggctctgctccctttgatatgcatccgagacagtgaaacccacagataacacagctgaggtgctgagagccccagagggtggtttgctccctgacaggttcattcctcattgaggatggagagtgtgggaggaggagccgcagaggtggctcctgtgacgaaggcagccttgcccactgcctgtgtgattcccatgcatctctgggtatgttctggaagttgtttcctaaggaaattcttccagccatttccccacacagcttttttttggggggtgggaggggattgttgtgaaggatgggggtcatctggaaggatgggtttagacgcatttcattattgccgtggtccaaacccaggttcttcatcacagtcccatgtgctgctcttgctggccgtgactgtggctggtgaggtgagaggtgcaggtgaggagaaaggatcttccggagccgagtggtacgtgggggactgaatgtagctgttaaaatgcacatacacgttctcttcataaagtttgcccctggatttggccacagcggggggcagctggtttcgctgtgtgggaaccactggaaaagggttctgaagagttctggaaaagacagtttgcaaggccagctggtcagaggaacagggtcattgggacaacagttgtcattaagaggattttcccagagcagtgtttattccacggtagcagaccgggatccagtagactgcagagtggggctgaagagggtctgcactgtcgcaggccctgctaccggcccatttgcactttgcatagagcctggtgtggggccctcgggggacgtcagggcagccaggtgggtcccccaaaccatagcccttggaggacatgcagttgtttactgagctctactgggaagctctggctattagatgtccactgcagccaccaggcacttggccaccttcctggaagagccgttgtctcagctggaagagacttcatctctgggctcctgctcaggttcaggcaggtgaaggaaaacgtcatgcactttcttcatggttcttcttgccttggcttcccgcagggtttctggtatttggacagtcagtgtctccatgtggctagaaaagtatgatgcatccattgtgctgccacacgctggtgaggggcaaggcctgagcttcagaggctcatcacagttagggcagcattcctccgcaggatctgccagccctgctgcagctggtcggtctcaggtggaccccgtgccctcctctgcagacgtgacacccgcatgccactgtgccaggcagggcttctggaggacgcaggtgtggggttgtttgtgttgcatgtggcccggctcgggggctgctgcctgctcttgccctcctagctgtagctgtgctctgtgcaagcaaacacgatctcgggaccctaaactccctctgccaaaggggaagttacacgctggacctgggtctaagcctgtctgcttttgttcgcaagcagacagctgtcgcttcatagccctgggtcgtagccccgtgtcctgttatgtctcctgtcacatgtcactttatcttgtgtaaagctagctttcctgagctcgaggggatgcgtgattgtctttgtcctgccccaccccccgccgccctttcttcctccagcttgctctcccttttagacacagatgtttaggaagcccctttggaaaagcagaggccatggcgctcctgtgatttgtgtttcccggggcacatcctcaactttggataaatcaacctcgagtcggctgagactccctcagtccctttttggttgacggctccgaggaggaacctggccgcttgctcccagaagcggtgtcttgttcttgttcgcgttcagtggcaggactgcctccttcgcaccctagcttcacggctctgtctttaggatcagtcccagctctgtgatcaggccaggccaccccgggtttcctctgctcgcctcctctcagaagggcttggggattgtgctctccaaggttcttgacgtcactgggtcagtgcactcttttcctgaggccactcgatggcaggcggcatgtgacaccgaggatggcgctttctcagcaggagtctgtttgtttctttgccattgttttctataccatgaataaaccacagagggtggatctgttttccgtctcaggctactgtgattccagcagctgtgaacattcttactccggtgtttggatggaagccttgcctgttggagattgagaagttcacattgcgttgtttgagaatatgtcatgtccagcactggctcctcgtgcgtgctggccgctgtccttagggcatcctggcaggtcaaacagctccagagaagcctgcatgtttgtatccaaggccagccactgcaatgaggttctttttcaaatgagtgacttcacttcctggtcattgaattttaatacttgtcaaaggctgtttttattttaaaataaaattttaggccaggcacagtggcttaagcctgtaatcccaccactttgggaggccgaggcaggtagatcacctgaggtcaggagtccgagaccagcctgaccaacatggtgaaactccattcctactaaaaatacaatattagccgagtgtggtggcgcatgcttgtaatcccagctacttggtaggctgaggcaggagaatcgcttgaactcgaaggcagaggttgcagtgagtcaagatcataccattgcactccagcctgggcaacaagaacgaaactccatctcaaaaataaaaattttaaaattttgtttacctatgtgatggttttaattttttctaactgttctttgcagctagatactagggttactcaatttacacttttatgtgattcctcatctagacgttgcataaggtacaaaaaagtatatatatatgtgtgtacatgatggagttacatataaataacctgtaggaaaatatgaccttgattttgtgcagaaactttatctggaaacactgaaggtgccttcattagcagaactgcacagccgcctctgaaaaggtacgtccactcggcatggaggagtcggcgtcccttacccagttaataagatcaatgaatgcgcaggtctttcttcttctagcttccacccacaaataaaatggttccaaaaagaagatgtcgtcatcttaaagataagaataaggaatgtaaaggactacaagtgtcagtatttaagggatagagtcgttttcaggtaggtttatgtatagtcatataaagtaaaatagaaataatttttagcattttaaaaggctgactttatttctttttataaacccagtgcttgggtgggagacaaattttacctggctgatctggagctgcggggcaacataaggaaagatgactgccaatgtgtgattagaaacgatgaacctgtaatcactctggccaaagagagaagggaggcatggtgtcacctactcagacagagggtgagttgggatgcactcagcgggtggtctttaccctgcgtgtgtcatattcacgcgctcactgtcagctgttctcttgaacagaaccccaacgtggcttttgattttgatcactgggaagactgtgaagaggacagccacttccccaagggtaaggcatagagcgcccactctccgaggggttgtaggttctgagggcagtgagggacaccatcacccacttaggaattcagccttggtggaagtggaccgttcatgtcaagccctgagaaatcagttttctctttgtttatcttggtgctaaacgttctggtttgagtacttttcaacccttggtgataaacacaccttttaataacacactacagatattcttcctagaagaataaattatttgtaagcagaccaatttgacctgctcatttcttacctaaaataatgaaaatataagatacatagagctggaacccaaggcatttttttctgcattgacccaaataatggggggaaataaagatttgctgattagtctacacttatttgttataatatcttactcctttagtagtgaattctaaaaacctgccgtacacagtgacagaggtggttgaagacagtagcagcacttcagaggatgacgacagtgagagtgaaagagaaggtgaatgacgtcctcaagagcggctggaagatgttgaacaaaaatggatattgccatgtgaccgacagttaagaaaacagtcagtcataaccaaatctttttcttttcttttctttttttttttttttttttttttttgagacagagtcttgctctgtcggccaggctggagtgcagtggcatgatcttggctcactgcaacctctgcctcacaggctcaagcaattctcctgcctcagcctcccgagtagctgggattacaggcatgtgccaccatgcctgaccaatttttgtatttttagtagagacagggtttcaccatgttggacaggctggtctcgaactcctgacctcaggtaatcctcccacctcagcctcccaaagtgctgggattacaggtgtgagccaccacacccggccaaccaaatctttctttacctcaaggataaatgattactgtcaccttgtggtgctggacttgataacggtgagaaattcttcattgacttaaaaataggctgatgataagaccatcaaaggagggtggacacagagaaacagcaggtgtggtctgattccgccggcttgtctgtcctgtctggcgcctctcgccactcaccctggcagagcagacatgcatctgggtgatgaaatgcactgtctggagtcagtccattcattttttttcacctagacctttgctacattgctacaaacctgatcttacacatataaattgaggtttctaatgtacacacttagactcagcaactgttgaaccagccctttcaaccatgagatagtgggatttaacataaccatctatgtgaattgatagtgttagcattcttggatagtgatagctcctcagagtaagttgacttctgatgaagagatagtccagggatagaaattggattgctcagtaagacccaggcctttccggggtgaagctgctggttctaaacaatcccttggacctgcagagtcctgagcaaatggcacaaaggttgctttttagtggaaattcacaagggcctgtggggtgcctggaggtgatctttgaatgcctacatgtcgtgagccctgcagacattcgccaccccatctgcattgtggctgcagcactggggggggtcaccaggtttaggggaggagtgtatgtagtcatggccacacccagaggctggcttttgtgctttgggtttctttgttgactgaaaaagcgagaaaggtgagctattgggaaattaaaagtcctgtgcactctgtgtcttgtttatcagctttgcctcggaatggaaaagaatttggatagaacatgagtgttgtgtgacggccccaagatctttattatttttttgtatcagaaagcgccaatgcccaggcttatgtatgtcccagcagaagccaccgcttgaactagaggtgaactttgtcatcaagctgtcctgtgagcaggtctggatcacactctggctcagttttctcatctgtaaaatgagacatcccctcattgtgtggcctggccttgtctcagggagcgcccgccgagtgctgctgggttgggcagtttttctgcccagtggctctgatgggggctcagagccctggcctcccctgggaggacacgctgtgcagccaggacagctgccgggagtgtgcccaggtcactgctatggccttcgcagggtgactggcaggtatcaaatcagcccatgaaggaagatggtgattttccttttttgtagctaaattgggcaggctcttgggaagtagaaagttctggtgtttttgctggtgaaggttttgactgtggagctcttctaacacccatatcagtgtctgtttctctgcatgtggctgctgccctgttggtggagctctgggggcagagaccaggccgccgtccagtggcgccccgtgcgcaccagctgcctgctgtttacacccaggtgcgccgagtctctttcatacagcacagcaaatgataatagctagtgacaatgtgtttcctgtgcactcgtgaaaatgcagggaggacaactgcatgcttagatctgtttcttttttcagacattcaaatgttctaatatctgaagctaacattttgtaggatataggatgctgattatgtgaacaattagtcattggttttctgtactgctatgaatatgtctgatttcaagttttggtcaaatatctaaaatgcaaggtgaaagtgcctttgtctctatgcttctaaaatcgctcatgcttagttgtggtatggatgtcttccgcagtgtatcatcaataaaatttcactgttttcacagaaatgttgctttttacattttttaaacagtactttccctgaatgccaaacacagaataaaactttactcaccacactttctggtttgactaaaacgcccgtgaaggctgctagggagccagcgatgctgactggcaatgcaggcgaccctcgtgatgagcacaccggctgtggagggttctggatggaggctcagctcttgccattcatcctggcagatagatagatacatggcacgcacatcacaggttcagcacagggcgccagtactttacttttagggtaggggagagtgggtgagaaacatttgtactttaatatttttgtatatttatttactttttgagttggggtctctgtcatccaggctggagtgcagtggcatgatgatggctcactacaccctggactccaggctcaggtgatcctcccacctcagcctcttgagtagctggggctacaggtgtgcaacacgatgcctggctaatttttttatgttttttatagattagatacatgattttgccatgttgcccaggctggtcttgaactcctggactcaagcgatctatccgccttggcctcccaaagtgctgagattataggcgtgagccaccacacctggccagtaatttactgttgttttaaaatctatagcaatcaatcaatcaatcaaagcaaaaatgtcatccattttatataagagaccttattgacattgagtttaaagaacacctttcatttaagtgtgatgtgccccttgttaaatagctgccactgtaatggaggcttttattcagcccttccctaagcatctgcctcttgtttgttaggtgacatctcacctgacaacaactttagcaaacaaacacttgccacttcccctttctagaacccccactcagagaactaagaatatctaaaaataacaatattttaaacatctgagtatattttattcgtaagaaaaaaaggaagaaataaccacaaatattgcttaagaaaataaattcagctgacttggctacaagagacggagcttgttactcagggtcttcctccggtgggaccacttccattagcatctgaaggtgcatggtaatcggctctgaaataagagtcaaaaatgagtacagttagttagactgaaattcgaaagtttcactggagttgttgtgggtgagggtgacattgttttcagtctttggtgatgcgtcacctagaccctgtgctcaggatggccagctttcctgccttctggttggatttcacactttcctggcttctgtcttctcccagaattgcaggaatagaaataaaaacctcctaggagtgtccggagggacgactgcactttccagttcagatgagctgaacaggagaaacaggcaggcttttaatcacattcacttaataaatcttaactggctgttacaggctgccgcagccagagttaaattgcacacagcccaagtcctgtcctcaaggagctcctggaagaggatgcccaggaagtcttaaaggcttttagaaatggggtttcctaggcaggcggatcacgaggtcaggagatcgagaatatcctggctaacacagtgaaaccccgtctctactaaaaatacaaaaaaaaaaaaaagaaagaaagaaatagggtttcctgcagttgaatctgttgtaaaggataaaacattgtgaatgtaatatagactttttgtttttgtgttttttgagatggactctcgctctgttgcccaggctggagtgcagtggggggatcttggcttaccgcaagctccgcctcccgagttcacgccattcttctgcctcagcctcctgagtagctgggactacaggcgcccgccaccacgcccggctaatttttttttgtatttttagtggagacggggtttcaccgtgttagccacgatggtctcgatctcctgacctcgtgatctgccccctcagcctcccaaagtgctgggattacagacatgagccaccgtgcccggcccgatatagacttttttaaaggtgtaattccgtctcttttgatgtactttgacacaagtgctttcttttcagaagcaaaagtggctactaacatagctaaacttttaaacaactgtcctaaaactgatgagggtcaggactgctgaaagagtgagccctgtgcccttggcattaaaaggcttgggccccagcccagttccccaggccaaggccatgactttttgtgtgtctttgcaatgctgctaggcctcttagatgatgtctgcatatcagacaaaggagaatggtgtttcaggatgagacgcatgatggtgggaatatgcctaatgctactgaactttacactgacaagtggctgagatagaaacgtttatgttgtgtgtctttcgcaattaaaaagaaaatggggctgggcgcagtggctcatgcctgtaatccctacatttcgggagactgatgcaggtggatcacctgaggtcaggagttcaagaccagcctggccaacatgatgaaaccccgactctactaaaaatacaaaacaacaacaaggaaattagccgggtgtggtggcaggcgcctgtaatcccaactactcaggaggctgaggcaggaaaatcgcttgaacgtgggaggcagaggttgcagtgagccgagatcgtgccagtgcattccagcctggacaacaagagcaaaactccatctcaaaacaaagaaaatgggccgggcgcagtggctgacatctgtaatcccagcactttgggaggccgaggtgggtggatcacctaaggtcaggagttggagaccagcctggccaacatggtaaaacctcatctgtactaaaaatacaaaaattagctgggcgtggtggtgcacacctgtaatcccagctactcggaaggctgaggcacaagaatcgcttgaaccgggaggtggaggttgcacagtgagctgagaccgcaccactgcactccagcctgggcaacagagtgagactgtgtctcaaaaaaaaaaaaaaaaagaaagaaagaaagaaaaagaaaaacggccaggtacggtggcttaggccagtagtcccagcactttggagagccaaggtggaagggtcatttgagcccaggagttcaagaccagtctgggccacctagcgagactccttctctacaaaaagtaaaaaaaatagccaggtgtagtgtgtgcctgtggtcccagctacttgggaggcccaggtgggaggatggcttgagcccgggagttcaagactgcagtgagctatgaccatgccactgcactttagcctgggcaacagagcaagactgtgtctccaaaaagaaaagaaaatggtgctttcccttcctacttattacagtaattgacaggaacaaaacaatcaagggtggacccagaggtgtacagtgagggcgtgggcatgtgtcctcctgggacgagggagatctgccagcagggtgagacactgtgacagaggtcttggagtcaggacaggtgaggacgccgtgcctgcctgcacctcacagaggccaagcggcccttctgttggtacttacttgagattttctgagcccatccaaacttgtagtggacaaacaggaagtaaaataaaaggccgcttaatataaacagcacacagtagaggtactcccaggtgggcttgctgatgattggagccagaaccaaaaacacagagatgagtgtcatcaagacgggaatgactacgggcacctggagacgaaaaacaggtcatgggtacccattttctttttgaaatttttcatgataaaaaaccgatttttataaaaagagtatgaactccatgtaccccctcctccaatttcaatcattttaatgtaattttgccaatcttatttcatctataccttttaaaaattttctttactttttaaaaagttttttggccgggcatgggtgctcacacctgtaatcccagcacttagggaggccgaggccggtgggtcccttgaggtcaggagctcaagaccagcctggccaacatagtgaaacaccatctctaccaaaaacacaaaagttagctgggcgtggtggcaggtgcctgtaatcccagctcctcaggagctgaggcaggagagtcgcttgaacccaggaggcagaggttgcagtgagccgagattgcaccattgcactctagcctgggccacgggagggaaactccatctcaaaaaagaaaaaaaaaaatagataaactgtttaatgttttagcatccactgatgatcgttgccttcattgtttcatcagggtttgcaaaatggtgatttttctaatttgtaatttcttcctcaattatctgaaatgctatatgaagtacttcaactttctggttattctgaattgcagttcatacaggaaaggcaggattagtgctgtattctgtgtgtttccagaatgacaagttgggcccctgagacctccaaaggcaactccagcctgtgggtttttctatacatggtgagtttcaacccgttgtagtcattgttcacgttgttcagaaggtcctgtgcggggcggcaggaacccctcacactgtcctgggccctgggaatgggacgccagtgctcttcaaaagcctctttgttttctgggtgacaagaagtgccatacctgggttttcatttatctctccagagccagacgtgggttttcatccatttctccagagagctttgtttccttttagcaggaaatggcatttaaagaccataacctggaggctggctgcagtggttcgctcctgtaatcccagcactttgggaggctgaggcaggcagatcacttgagtctaggagttcaagatcagcctggccaacatggtgaaaccccgtctctactaaaaatacaaaaattagccgggcgtgatggcagatgcctgtaatcccagcaacttgggaagctgaagcaggagagtcgcttgaacccgggaggcggaggctgcagtgagcaaagaatgtgccactgcactccagcccaggagacagagtgagactctaaaaataaataaagaccataacctgggtgattggagtactcattatcctttttcaaggacagagattaattttggtattctcttattaggaacaaagttaagtttgctgggattgttttgttttcatttttaagtgtcattgcatttttcctttgactgtgtttttttgtttgttttgtttcccaagacagagtctcgctctgtcgctcaggctggagtgcagtggcgtgatcttggctcactgcaacctctgcctcttgggttcaaacagttctcctgcctcagcctcccaagtagctgggattacaggcgtgtgccaacatgcccagctaattttttatttttagtagagacagggtttcaccacgttggccaggctggtctcgaactcctgacctcaaatgatctgcccatcttggcctcccagagcgctgggattacaggcatgagccaatcacacccagcccctgaattaaacttttaattaatggattttcggtcttcagctacctttgcataggctggacctagtcatgatatattatctttttagtgtaactgggttctgtttgttaacattttattttagattttttatatcgttattcctaagtgagattggtgagtacatttcccttttttgtgtgaagttacctttgtaaggtttggtgtcaatgttacagtctaaaaataatttgaaaaatcaataaaatcaatagctaaccttaaaaaggagaaagcacaaacacaaataaaaaataaaaatgggcaattaatctttacaacataagttatgttctaaagattaatacaaatcataagactattttgtacaactctatacagataaatttgaatacatggaagaaatgaacaattttctaggaaaatgtaatttactaaaactgatcttagttgcattagaatcacagggaaattctaaaaatcagacaattccagtattgcttaatttattccagagcattgaaaaaggaggaaaactttcaaaaagactgattattattcactcattcattcatttctgttttttctaacaccttaagtttttttctgcttattagttccttctgttttcttttggttttctgttgttctttatcttgcttttggagttgtctatttaatttgttttcatttttattgatatatttaatgtaatggagcttcctcaaagcactatttaagctgtgttcatagattatatgtcctgtcatcattactgctatttctaggaatttatgtactgtgtgtgtgtgtgtgtgtgtatgtgtgtgtgtgtgtgtgtgtgtgtccgagtctcactttgtcacccaggctggagtgcagtggcacaatctcggctcactgcaacctctgcctcccaggttcaagtgattctcagcctcagcctcccgagtagctggaactacaggtgcccgccaccacgcccggctaattttttgtatttttagtagagacagggtttcaccatgttggctaggatggtctcgatctcctgaccttgtgatccgccggcctcagcctcccaacatgctgggattacaggtgtgagccaccacacccggcctaatttttgtatttttagtagagatggggtttcaccatgtttgccaggctggtcttgaactcctgacctcaagtgatgcaaccgccttggcctcccaaaatgctgggattacaggcgtgagccactgcgcccggccagaatttatgtacttttatcttctatttctattaatatttcctcttggacccaaaagtttaacttttttcttttatcaatttcctgttttgtttcattaaagagagagaatgttatttgctttttggttgttttgatttctggggttttctttttgaaatatcaaggttttcttcatggcattaaaagctgtcagttttcagacaggtcccatttgcaactgaaaaaggtatactcgctgttgctggggttcggggcttgatacaaacctctaagatctatcttgctatattttagatccccagtcacttttaccagtgctgcgtccagatctgtcttggcctgaaggaggtgttttccagtcacctgttattaacgtgtttctccctccgtggatttcctgcagtttctgcttcgtaaagatggttgctatatggtttggtgaataggttttcaaaacttacctcttcattgtggattttagcctttagcatggcctgtctttgtcttaaataatgctttgggcctgagcacttgtctgataagatcacagcccctgtttttctgtatattcatttgcttgatatttctctgcctgttcttttaatttttcacagctttgaagatccgcctgaaaaatcttttactttcaatggctgatgtaagtccaatttaaatggagtaagcccgtttattcatataatgataagtctggtctccattctctcgtgttgttttatctttctgtatacaagcatcctctactcactgtcagtcttgcgtcctcgaagagtgatgttctatggaagaaccccccaggcctgtgtcccttcttttaaattcaccataggaaacctcaaatttcctgccaggtgctgtggctcacacctgtaatcccagtactttgggaggccaaggcaggaagataacttgagccaggagttcaagaccagtctggcccacatggcgaaaccccatgtctacaaaaaatacaaaaattagccaggtgtggtggcgtgcacctgtggtcccagctatttgggaggctgaggtgggaggatcgcttgagcctgggaggcacggttgcagtgagttgtaatcacaccactgcactccagcctgggtgacagaggagattccatctcaaaaaaaaaaaaaaaaaaaaaaaaaagaaacctcaaattcccaaccaaaaaacagtaaatgtgcatataaataacatgttacccaacacagattacattagatggtaaactgtgtttaaaataatttttggtgaccaaacagttaacatggttgttgaccaatgactgcctttaatgcaataacatggtctcgcaagacgtgagacgcttacacctcacactgtcagtacgcctacacgtggctttcagtacgcctacacgtgattttgatgtgtgttgaatttggaatgtaacttgaaacttttatcacacattttgtcaaaagtttatactacattttggggattcagatactgatttttccatataaatatcagctggaaatgaaagcatttagagatgcatggattctatagttcagggtgttaaaagctaataagcaaaaaatagcaatgacaaaaaatcctaataagcagtctacaagaaaacatcaaccaggaaggtattctgagggagatctgccagcagggtgagacactgtgacagaggtcttggagtcaggacaggtgaggacgccgtgcctgcctgcacctcacagaagccaagcggcccttctgttggtacttacttgagattttctgagcccatccaaacttgtagtggacaaacaggaagtaaaataaaaggccgcttaatataaacaaggctttataggtagggtcctttacagtatggtctgttttgtttccctcctttgtttaaatgttaaattttaattatttcatgtattctaagcacacttcctcttttttaatgtgtcttttggtaggtatgaaggatgtgtttttgttctgagagttactgtaactattatagctaatatattataactaatatattttaaaggggactaagggcattattatataaggatatattctgtataatatatgtgtatattatataagaatatattatatctaataggcacaatctatacatatataataggcataatatacatatatttaatgctatatatatttgttgtatatatgttatatattatgtatatatacatatcatgtgtatataaaaacgtatattatacatatacctataatatatacttatatacaacatatttatatcttatatccttatataatacccttagtccccttttaaagatattatatatgtatatatgtacttatatgtatatgtatttgtatgtataacagacatgtaatgatacacatatacatatatacatatatgcacatatatacatatacaaatatatacatatatatctattatacacatatattacatatattatacattatacacatatatagtacacatatatgtatatattatgtataatgcccttagtccccttttaaagatatgaattatattattaactgagcatataatacccttagtttcttctttttttagacattgtgtataataagcaataatgaagttagctaggtgttctcttcctcccagcatctaatttaaagtggcttccttattggcagcttgtctggcatactttcctcagttggcatatacttttccatgtgctttctctcgtccatgtttttgtatgatattgccagtgcataatagtggcatacacttctgtcccctttatctctcatcattaatcttagttctataatttgatatattcacctttgccagtgactttttggtttctgaagctcattctctgggtgattcctcaaggtctcatgtaattggcggggcacggtggctcacacctgtaatcccagcactttggaaggctgaagtgggtggatcacaaagtcaggagttcgagaccagcctgaccaacatggtgaaaccctgtctctactaaaaatataaaaattagccaggcgtggtggcacgcgcctataatcccagctacttagaaggctgacacaggagaattgcttgaacccaggaggcggaggttacagtgagctgagatggcgccactgcattccagcctggatgacagagtgacactccgtctcaaaaaaaaaaaaaaaaaaagtctcgtgtaaggatatttgccttgagttctttcatactagtgactgtagactttattctgcaaggtcagtttggctgggtataagaatctggcttacattttcctcctttgagtagtttaaatatgttgctccactctcttgcagcatgaagtgttggtggtgaaaagtttgaggccagaattatttcctttcctttataagtgaattgcagatgggagtgggaacaggaaaaggggaggggatgcccaaagcatttttttaaagctctgtaattttatcagcatatatttttgctgccaattttagctcaaaatttccagttacattgtatgcctttcagtatgttggttcaagatcaccctccatttttcctcccaccccaggaaatgtttcttgaattatggattttgggattctgttacttgcattttcttcttcagggactccaattatgcatgtattagattccccaccttccccacccctagtttttttctgtccccttgttttctctcaaaccctttctacttctgtctgatatttgttttcttccttttggccttctgtttcctagcatgtttctttgctcttatgttctttcttttctttttttctttgcaacggggtccctctctgttgcccaggctggagtgcagtggcacgatcttggctcactgcagccttgacctcctgggctcaagcattcctcccacctcagcctcccaaatagctgggactataggcgtgcaccaccacacccagctatctttttgtagagacagggtcttgctgttgcccaagctggtcttgaactcctgggatcaagtgatcttcctcccttggcctcccaaagtactgggattacaggtgtgagccaccacactcagcctctgtgttccttcttttccttcttgcccactctttatttctgaaatgatttttttccctaaaatgatgttttgaagtgctaatgggacatggcctctctgtggagccccttcccagttgagagatttgtatccacaggctccagctccttgaccctgatattcttgccaagttccatgtcctttctctcccagcagttgtttctcttgctgttgtcgtcagtgatccttatccttctggaaaggagtttttgtggggagtttctgggatcctcaagggcttaagccactgcagccctgctcctccacctcccctgggggtcctctgatcttcccactgagaacctcgttccacgtgcgccctctctcctgggaacacatggtgctggagtccagtggggcatccacttagagtctggagttggtggtaagacttcatttccttgatttgtgttgacaatgttggctgaagtgttttcctttggtatcctagaggctctgtctgtttctatgagggattttgtgcagattacaagtctatgctaccgtcataattttgcctgcaatgacttaaccaaggtggatctgccagactccaggcaggctgtgccatgactcagctgatgccagagacttgtccatagtcaagacacagggccagaaagaccactggatgtatctctgaaaacaaagtcctaaagctaaagacattgtccttattctcgtcctagttacttaagccctcagcttacctttttcttatgtctgttatcataagaattaaatagcaggttttttttaaagccccttaacataacaacaataaaattctacttcatccttattggtatatagatccacaccagccatgcagggagtgagagggagcccgaaacagatggcaagaatagactctgagtggttgcatgcacagcaatgagtctgcggctggagttcagaagttcccatcagtctatgaaaggaggccggcatagtggctcacacctgtaatcccaggactttgggaagccaaggtgggaggatcgcttgagcccaggagtttgtgaccagcctaggcaacacagtgagaccctgtctccaaagaaaaaaaaatgaaacaagaaaaatctatgaaaaatatatgtgcgagagatatcagaactgggctgggtgcagtagctgacacctgtaatcccagcactttgggaagccaaggcaggcagatcacttgaggtcaggagttagagaccagcccggccaacatggtaaaaccccatctctactaaaaatacaaaaattagccaggcgtgatggcagatgtctgtaatcccagcaacttgggaagctgaagcaggagagttgcctgaaccggggaggcagaggctgcagtgagccaaggatgcgccactgcactccagcccaggcgacaaagtgagactctgcctcaaaacaaatgagagccaggtggacctctttggttacagagacgggccacaggtattcgtgatgacttaataaaatgaataacaaggtggctaactggatcataaactatgctgtgaagagtaaactccactctaaaatacgatattttaaaagagtcaagtcagattggaactagaaggcatgcccctagcatttgaaagagttacatctaattcattaaaaaatccaaagccactcgtgactctggggctgcaagcttaccttgataggcctttccagctctttccttgtaaatctcatcacgatgagtcctagaatcgtcaggccataaaacagccatgcggcaaagctgaaataattgactaacgagtttatgtcaccagggatgatataaatcgttgctatgataccctaatagaaagaagaatggatttgtaggtcattactacaaaacactgttctcatgtcacagaagaccgaagaagcagtttttcttgtgaataaacactttagcatgaaacgaacttctaggcattccttcatagttggggttaaacctgactttggctatgatagctcttctctatgaagcttgcagaaaagacctgggaaatttctgaatctttgaggttgtgattttaagcaagggaaaaataaaatattaggttggtgcaaaagtaactgtgggtttttttgttttgttttgttttgttttgttttgtttgagatggagtctcactctgtcacccaggctcgaatgcagtggcgtgatctcggttgactgcaacctccgcctcccaagttcaagcgattctcctgcctcggcctcctgagtagctgagattataggcaggcaccaccacacccggctaatttttgtatttttagtgagatggggtttcgccatctcacggttttaatggtaaaaaaccgcaattacttttgcaccaacctaatatgtatgaatattataccagcttcataattaagaattttccacacagagagttttcaatgtgggctggggccctggattagaagctcaggtctagtcttggcctgtgttagttgtgtggccctggactggtatttcctgggtgtgttttcctgtcttcagaatgatagagagtagtggttctcctctgggggaaggagtgtagaccacccctggggctagaaatgtggatggtttatcagtgcccagaacagttgcacaaaacaagaaccatgcaccatggagaagctcccatgggcagatgtcaaaggggtggccaggcacggtggctcatgcttgtaatccagcagtttgggaggctggggtgggcaaatcacttgaggccaggagttcaagaccagcctggccagcatggtgaaaccccatctctactaaaaatacaaaaagtagccaggcgtgatggcaggccccttcaatcccagctactcggaaggctgaggcaggagaatcatttgaacctgggaggcggaggatgcagtgagccaagatcatggcactgcactccatccagcctgggtgacagagcaagactccgtatcaaaaaaaaagtcaaagggcgtttactgcacaaggatccggtgacttcttaatcattagagcataatgagaggcagctgtcagtaactacctgggaaaatgtcttgctctccttccctgtaagctagtgggcttttatatagagtttgttaccagggacccagcacagacaaatgcacacagaagcattgagggcatacactgtctttcgtggataaattcagacaaaggagcagatattgggtatgttgtttcacttgtcctgggactctttctatatctgtttcatagcaaggaataagggcatctgggtcatttggaagccgccgggcttagcaccccatggatggagtgtccccgccttgaagataggctggtagcgggatttgtactcacataaaagatgatggcgggggctggagtgaggcgcctgacgctgatgtaagaaagcactttgagcatgtgaccctcccggcccgccacgtaaatgagtctggaaaataacgacacgggagtccgctgaccagagtgcagaccatctgtccagggccactgaggacttgtgctccggggtccaccaaggagccctcgggaggctcaggaagggagctgagcagggacctgagcttcagatgggggtctgtcttcgggagacgagtgggttttggcagagtgagtgaggaggttaaacgcactgagagactaggtgtggtggctcacgcctgtaatcccaacaccttgggaggccaaggcagaggatcacttgagcccaggagttggagaccagcctggcaacatagtgagatcccatctctacaaataactttaaaaattttttaaatgtaccatttatttgtgttgggaacattcaatatcctcccctagctatctgaagctacatattaatattaatgtgagctctagccaccctgctgtgtgtagaacactagaacctgttcctcctgtctagctgtaattttgtatcctttagcaagtctctctctatctccctttccccccatgcttttcagcctctggtatcctctggctaaccagaatttcttgaaaaagttaccataattaaaaatttcggccaggcacagtggctcacacctgtaatcccagcactgggagactgaggcaggtggatcgcctgaagtcaggagttcgagaccagtctggccaacgtggtgaaaccctatgtctactaaaaatatgaaaaattagctgggcatggtggtgcacacctgtagtcccagctactcagggggctgaggcaggagaatcgctggaacctgggaggcagaggttgcggtgagctgagatcgcaccattgcagctaagatcgcaccattgcactccagactccagcctggacgacagagtgagaatccatctcaaaaaaaaaaaaaaaaaaaaaaaaaagccagatgtgatggcttacacctgtaatcccagcaatttgggagcccgaggcaggcggatcatgagattagaagttcaagaccagtctggccaacatggtgaaaccccatctctactaaaaatacaaaaaatcagctgggcatggtggtgggcgcctgtactctgagctgcttaggaggctgaggcaggagaatcgcttgaacccgggaggcagaggttgcagtaagccaagattgtgccactgtactccagcctgggtgacagagtgagattctatctcaaaaaaataaaaataaataagaggagaagatataaaaaacaggagcctgagctgggcatggtggctgtcgcctatactcccagcactttgggaggccgagacaggtggactgcttgagttcaggagttcaagaccagcctaaccaacatggggaaaccccgtctttactaaaaatacaaaaattagccaggtgtggtggcgggcacctgtaacctcagctgaggctgaggctgaggcaggagaatcacttgaacctgggaagcggaggttgcagtgagccgagatctcaccattgcactccagactccagcctgagcgacagaacaagactctgtctcaaacaaaaccaaacaaacaaaaaaacccaggagcccttgaaacatagcagacaaaaattggcaaatccaatttgagcacaagatttgaacattacaagttataatcttgatgatcatataaaaatctagatataattatggaatacacattatcttcaagaccacaggaaacataaaaatatcagtgagccacgaaggtcattttcaaacttctaaagaattgaggccaggcacagtggttcatgcctgtaatcccaggacttcgggaggccgaggcgggtggatcacttgaggtcaggagttcgagaccagcctggccaacatagtgaaaccccctctctcctaaaaacacaaaaattaggtgtgatggcaggtgcctataatcccatctacttgggaggctgaggcaggagaatcacttgaacctaggaggcagaagttgcagtgagccgagattgcaccactgtactctagcctggatgacagagtgagactctgtctcaaaaagataaataaataagaattgatgggggcatggagccaagatagccgaataggaacagctccggtctacagctcccagcgtgagcaacgcagaagacgggtgatttctgcatttccatctgaggtaccaggttcatctcactagggagtgccagacagtgggcgcaggacagtgggtgcagcacaccgtgcatgagccgaagcagggcaaggcattgcctcactcgggaagcacaaggggtcagggagttccctttcctagtcaaagaaaggggtgacagacggcacctggaaaattgggtcactcccaccctaatactgcgcttttccaacgggcttaaaaaacggtgcaccaggagattatatcccgcacctggctcggagggtcctacgcccacagagtctcactgatggctagcacagcagtctgagatcaaactgcaaggcggcagcgaggctgggggaggggcgcctgccattgcccaggcttgattaggtaaacaaagcagccaggaagctcgaactgggtggagcccaccacagctcaaggaggcctgcctgcctctgtaggctccacctctgggggcagggcacagacagacaaaaagacagcagtaacctctgcagacttaaatgtccctatctgacagctttgaagagagttgtggttctcccagcacacagctggagatctgagaatgggcagactgcctcctcaaatgggtccctgaccccccagcagcctaactgggaggcaaccccccagtaggggcagactgacacctcacatggccgggtactcctctgagacaaaaattccagaggaacaatcaggcagcagcatttgcaggtcaccaaaatccgctgttctacagccactgctgttctgcagccactgctgctgacacccaggcaaaaagggtctggagtagacctctagaaaactccagcagacctgcagctgagggtcctgtctgttagaaggaaaactaacaaacagaaaggacatccacaccaaaaacccatctgtacatcaccatcatcaaagaccaaaagtagataaaccacaaagatggggaaaaaacagagcagaaaaactggaaactctaaaaagcagagtgcctctcctcttccaaaggaatgcagctccctcaccagcaatggaacaaagctggacagagaatgactttgacgagttgagagaagaaggcttcagacggtccaactactccgagctacaggaggaaattcaaaccaatggcaaagaagttagaaactttgaaaaaaaattagacaaatggataactacaataaccaatgcagagaagtccttaaaggagctgatggagctgaaagccaaggctcgagaactacgtgaagaatgcagaagcctcaggagccgatgcgatcaactggaagaaacggtatcagtaatggaagatgaaatgaatgaaatgaagcgagaagggaagtttagagaaaaaagaataaaaagaaatgaacaaagcctccaagaaatatgggactatgtgaaaagaccaaatctacgtctgattggtgtacctgaaagtaacggggagaatggaaccaagttggaaaacactctgcagggtattatccaggagaacttccccaatctagcaaggcaggccaatattcagattcaggaaatacagagaatgccacaaagatactcctcgagaagggcaactccaagacacataattgtcagattcaccaaagttgaaatgaaggaaaaaatgctaagggcagccagagagaaaggctgggttacccacaaagggaagccggtcagactaacagcggatctcttggcagaaactctacaagccagaagagagtgggggccaacattcagcattcttaaagaaaagaattttcaacccagaatttcgtacccacccaagctaagcttcataagtgaaggagaaataaaatactttacagacaagcaaatgctgagagattttgtcaccaccaggcctgccctaaaagagctcctgaaggaagcactaaacatggaaaggaacaaccggtaccagccactgcaaaaacatgccaaaatgtaaagaccatcaaggctaggaagaaactgcatcaactaacgagcaaaataaccagctaacatcataatgacaggaccaaattcacacataacaatattaactttaaatgtaaatgggctaaatgctgcaattaaaagacacagactggcaaattggataaagagtcaagacccatcagtgtgctgtattcaggaaacctatctcacatgcagagacactcataggctcaaaataaagggatggaggaagatctaccaagcaaatggaaaacaaaaaaaggcaggggttgcaatcctagtctctgataaaacagactttaaaccaacaaagatcaaaagagacaaggccattacataatggtaaagggatcaattcaacaagaaaagctaattatcctaaatatatatgcacccaataacaggagcacccagattcataaagcaagtccttagtgacctacaaagagacttagactcccacacaataataatgggagactttaacaccccactgtcaacattagacagatcaacaagacagaaagttaacaagaatacccaggaattgaactcagctctgcaccaagtggacctaatagacatctacagaactctccaccccaaatcaacagaacatacatttttttcagcaccacaccacacctattccaaaattgaccacatagttggaagtaaagcactcctcagcaaatgtaaaaggacagaaattataacaaactgtctctcagaccacagtgcaatcaaactagaactcaggattaagaatctcactcaaaacagctcaactacatggaaactgaacaacctgctcctgaatgactactgggtacataactaaatgaaggcagaaataaagatgttctttgaaaccaacgagaacaaagacacaacataccagaatctctgggacacattcaaagcagtgtgtagagggaaatttatagcactaaatgcccacaagagaaagcaggaaagatccaaaattgacaacctaacatcacaattaaaagaactagaaaagcaagagcaaacacattcaaaagctagcagaaggcaagaaataactaaaaccagagcagaactgaaggaaatagagacacaaaaaacccttcaaaaaattaatgaatccaggagctggttttttgaaaggatcaacaaaattgatagactgctagcaagacaaagaagaaaagagataagaatcaaatagacacaataaaaaatgataaaggggatatcaccaccgatcccacagaaatacaaactaccatcagagaatactacaaacacctctatgcaaataaactagaaaatctagaagaaatggataaattcctggacacatacaccctcccaagactaaaccaggaagaagttgaatctctgaatagaccaataacaggctctgaaattgtggcaataatcaatagcttaccaaccaaaaaaagtccaggaccagatggattcacagccgaattctaccagaggtacaaggaggagctggtaccattccttctgaaactattccaatcaatagaaaaagagggaatcctccctaactcattttatgaggccagcatcatcctgataccaaagcctggcagagacacaaccaaaaaagagaattttagaccaatatccttgatgaacattgatgcaaaaatcctcaataaaatactggcaaaccgaatccagcagcacatcaaaaagcttatccaccatgatcaagtgggcttcatccctgggatgcaaggctggttcaacattcgcaaatcaataaatgtaatccagcatataaacagaaccaaagacaaaaaccacgtgattatctcaatagatgcagaaaaggcctttgacaaaattcaacaacccttcatgctaaaaactctcaataaattaggtattgatgggacgtatctcaaaataataagagctatctatgacacacccacagccaatatcatactgaatgggcaaaaactggaagcattccctttgaaaactggcacaagacaggggtgccctctctcaccattcctattcaacatagtgttggaagttctggccagggcaattaggcaggagaaggaaataaaagatattcaattaggaaaagaggaagtcaaattgtccctgtttgcagatgacatgattgtatatctagataaccccattgtctcagcccaaaatctccttaagctgataagcaacttcagcaaagtctcaggatacaaaatcaatgtacaaaaatcacaagcattcttatacaccaataacagacagagagccaaatcatgagtgaactcccattcacaattgcttcaaagagaataaaatacctaggaatccaacttacaagggatgtgaaggacctcttcaaggagaactacaaaccactgctcaatgaaattaaagaggatacaaacaaatggaagaacattccatgctcatgggtaggaagaatcaatattgtgaaaatggccatactgcccaaggtaatttatagattcagtgccatccccatcaagctaccaatgactttcttcacagaattggaaaaaactaaagttcatatgaaaccaaaaaagagcctgcattgccaagtcaatcctaagccaaaagaacaaagctggaggcatcactctacctgacttcaaactatactacaaggctacagtaaccaaaacagcatggtactggtaccaaaacagagagatacatcaatggaacagaacagagccctcagaaataatgctgcatatctacaaccatctgatctttgacaaacctgacaaaaacaagcaatggggaaaggattccctatttaataaatggtcctgggaaaactggctagccatatgtagaaagctgaaactggatcccttccttacaccttatacaaaaattaattcaagatggattaaagacttacatgttagacctaaaaccataaaaaccctagaagaaaacctaggcaataacattcaggacataggcatgggcaaggacttaatgtctaaaacaccaaaagcaatggcaacaaaagccaaaattgacaaatgggatctaattaaactaaagagcttctgcacagcaaaagcaactaccatcagagtgaacaggcaacctacaaaatgggagaaaattttcgcaacctactcatctgacaaagggctaatatccagaatctacaatgaactcaaacaaatttacaagaaaaaaacaaccccatcaaaaagtgggcaaaggatataaacagacacttctcaaaagaagacatttatgcagccaaaagacacatgaaaaaatgctcatcatcactggccatcagagaaatgcaaatcaaaaccacaatgagataccatctcacaccagttagaatggcgatcattaaaaagtcaggaaacaacaggtgctggagaggatgtggagaaataggaacacttttacactgttggtgggactgtaaactagttcaaccattgtggaagtcagtgtggcgattccttaggaatctagaactagaaataccatttgacccagccatcgcattactgggtatatacccaaaggattataaatcatgctgctataaaggcacatgcacacgtatgtttattgtggcactattcacaatagcaaagacttggaaccaacccaaatgtccaacaacaatagactggattaagaaaatgtggcacatatacaccatggaatactatgtagccataaaaaatgatgagttcatgtcctttgtagggacatggatgaaactggaaaccatcattctcagcaaactattgcaaggacaaaaaaccaaacaccgcatgttctcactcataggtgggaattgaacaatgagaacacatggacacaggaaggggaacatcacactccggggactgttgtggggtggggggagcggggagggatagcattaggagatatacctaacgttaaaatgacgagttaatgggtgcagcacaccaacatggcacatgtatacatatgtaacaaacctgcacattgtgcacatgtaccctaaaacttaaagtgtaataataataaaattaaaaaaaaagaagaattgatatcaggccagccactgtgccttacacctgtaatcccagcactttgggaggttgaagtgggtggattgcttgaggccgggagtttgagaccagcttgggcaacatagtaagacctcacatctacaaaaaacttaatattagccatgcatggtggcacgtgcctgtggtcccagctacttgagaggctgaggtgggaggatcacttaagcacagggaggggtctgaggctgcagtgagccatgattgcaccaccacactccagcctgggcgacagcgagaccctgtctcaaaacgacgaacaaaaaccctaaatcaagacttgatatcataaaggtcacatactctaattacagtgcagtaaaattagaagtcaatacaaatgccacaaagacccatctatttacaactacatatcttaactttgaattgatatgaacttgatattaattcccaaaagaagtgaaaccaggaggatgggagttgattaatggaagggagatttagacacaaggtgaatactgtcaaatctttttatcagtcctccagaaattaatatagaaattccataaaatcagaatgcaagcagtacttttggaaccggacaaaataattctaagtgtatagggaatgctaaacagacaaggagaagtctgacgtgggagcgttagtcctgccagattttacaagaccaaagctataaacttttttttttttttttttttttttgagagacggagtctcgctctgtcacccaggctggagtgcaatggtgcaatctcggctcactgcaacctccgtcccccaggttcaagccattctcctgcctcagcctcctgagtagctgggattataggcgcccaccacgtccggctaatttttgtacttttagtagagacagggtttcaccatgttggccaggctggtcttgaactcctgactttaagtgatccacccacttcggccttccaaagtgctgggattacaggcgtgagccaccacgcctggcccatgtcattccatttagatgaaatgtcaagaaaaagcagttatagagacagaagtagattagtggttgcctggagctgcgggtgaaagcagggattaattaggcaatgaggaaactttttggggtgatggaaatgatctagaattggattgtgatgtttgtacagccttataaatttatgaaaataattgagttgtataattacaaagggtgagttttatatttgtaccttaattagaactgttaaaattgtgtttgtgtatactagcaataaactatcagaaactaaaaattaagcaacttttttttaacagtaccatttacaatagtatgaaaaatgaaattctttggaataaatttgacaaaagatgtgcaagaactatataccaaaaactactcaaaaaacttttttttacagaaaattaagccaggcccagtggctcacgcctgtaatcccaacactttgggaggctgaggcaggtggatcacttgaggccaggagtttaagaccaacctgggcaacatggtgaaaccctgtctctactaaaaatacaaaaattagccaggtgtgatggtatatgcctgtaatcccagctacttgggaggctgaggcatgagaatcgcttgaacctgggaggcagatgttgcagtgagccaggatcgtgtcactgcattccagcctgggtgacaaagcaagatcctgtctcaaaaaaaaaaaaaaaaaaacaccaacaaacaaaaaagttgttaaaacaagattaaagacctaaatagtccacccatggattggaagactcagtattttttttttttttggagacaaggtctcactctgtctcccaggctggagtgcagtgcagtggtgcaatctcagctcactgcagcctcgacctcctgggctcacacgatcctcccacctcagtctcctgagtagctgggaccacaggcatgtgccaccatgcctggctaagtctattgtactttttgtagacatggggtctcactatgttgcctaggctggtctctaacccatgggctcaagcagtcctccccctcggcctcccaaagtgctttgattacaggtgtgagccaccgtacccatgctggaagactcagtacttttaagacagcagagtcttcccccagttgatctatggattcaacccagtcctgatcaaaatcccaacagctttactatagaaactggcaagctgattgtaatattcatatgcaagtgggaaagctgccagaatgaaattggacccttatctcaccccttagacaagaaatctactcaaaatggatataagacttgaaactgtaaaattcctaggagaaaacaggcaagctctgtaacattggtctgggcaatgattttttgttgttgttgtttttgagacggagtatctcactgtgtcgcccaggctggagtgcactggtgcgatctcggctcactgcaacctctgcttcccgggtcaagcaattctcctgcctcagcctcctgagtagctggaattacaggcatctgccaccatgccccactaatttttgtatttttagtagagacagggtttcaccatgttggccagtttggtctcgaactcctgacctcatgtgatccacccacctcggcctcccaaagtgctgggattacaggcgtgagccactgcacctggccttgggtatatatttgaatgaattgaaatcatatgccagatacctgcactcctatgtacctctgggtatatatttgaatgaattgaaatccacatgtcaggtgtctgcactcccatgttcattacaacgttattcaccacagccaagacatggacacaacctaagtgtccatcacagatgaatgaataaaaataatgtaatagatacacaatggaatactattccgactctaaagagaatggaattctgtcatcttttgacaacagagatgactctagagaacattatgctaagtgaaataagccagacacagaaagacaaatatcccatgatctcccttatgtattatggagtcctaattagggaaaatgagtcaggctggtgggaccaagggaaagccaaaagagataagacagataagctacaagcccgcctttcttcatggtccaggacacatagcccccctgcacaaataacttacaagcttcctgtgcccagtgatcgccagtccctcagctaatagaaaaatgcagccgggcgcggtggctcacgcctgtaatcccagcactttgggaggccaaggcgggcggatcacgaggtcaggagatcaagaccatcctggcaaacacggtgaaaccccatctctactaaaaatacaaaaaaaaattagccgggcgtgatggcaggcacctgtagtcccagctactcaggaggctgaggcaggagaatggcgtgaacctgggaggtggagcttgcagtgagccgagatcatgccactgcactccagcctgggtgacagagcaagactccgtctcaaaaaaaaaaatagaaaaatgcaagttagctcactgcaaccttggcattatcagtactgcacgtacccctgtccagcacacagcacaagcaccatcctacaaaatccccagcaagcctttgtctctttgcagtcagttcctctcttgctgacctgctcattgcacccttgcaatgtattttcctactttctgtaataaatctgcctttcctgacctacagctgtcttggtaaattcttcttatccctgtaccaccagcccagatagttgtaatcatctgcaacatacatgaaatctaaaaattcaaacatagcaatagagagtagaatgctggttaccagaggctgaaggaagaggggcctgggatggcaaaaggggaaatgttggtcaaaggctacagagtttcagtatgatgggaggaataagctctggtgatctactgcacagcaaggtgactattgttagtaatagtgtatatttcaaaatagctagtggtttttttttttttttctgagacggagtcttgctctgttgcccaggctggagtgcagtggcgtgatcttggctcactgtaagctctgcctcctgggttcacgccattctccttcctcagcctcccaagtagctaggactacaggcgcccgccaccacgcacagctaatttttggtaattttagtagagatagggtttcaccatgttaggcaagatggtctcgatctcctgacctcgtgatctgcccgcctcggcctcccaaagtgctgggattacaggcgtgagccaccatgcccagccagtgaatttttaatgttctcagcataaagaagtatgtgaggtgatacatatgccattccacaatgtttacatgtattgaaacatcacactgtaccacatacatatatgcaattattgttgttattttttagaggcagggtcttactctgttacccaggcaggagtgcagtggtgtgatcgtggcccactgcagcctggaacttctgggcttctggaactacaggcatgggcctctacacccagctaatttttaaatttctttttgtagagacggagtctcaccatgtggcccagactagtctcgaactcctggcctcaagcaatcctcctgcctcagcccatataagcaattattatttgtcaatttaaaataaggcggccgggtgtggtggctcacacctgtaatcccaacactttgggaggctgaggcaggtggatcacgaggtcaggagttcaagaccagcttggccaagatggtgaaactccgtctctactaaaaatacaaaaattagccaggcatgatggcaggtgcctgtaatcccagctactccagaggctgaggcagaaaattgcttgaactagggaggcggagactgcagtgaggcgagatcacaccactgcactccagcctgggtgacagagcaagactccatctcaaaaataatataaggctgggcacgatagctcatgcctgtaattccagggctttgggaagtggaggcaggaggatcacttgagccaggagttcgaaatgggcctgggcaacatggtgaaaccccatcttgactaagaatacaaaagttagctgggtgtgatggcacgtgcctgtggtcccagctattccagaggctgaggagggaggattgcttgagcccaggaggtagaggctacagtgagccaagatcatgccagtgtgctccagcctgggcgacagagtgagaccttgcctcaaaattaattagttaattaaaatttaaatttaaaatttataaagaaatacaaaggatctagccaaaacgcttttgacaaagaatgaagttggaggcctagcactacatgtatttcggtttggctttagaagaatgattttatggtatttcattttttaacatacacagactttgtcaatttcactctgaaatatatccattcagaacactggacaactaagccaagacacgtgttcgaggatgttcactgcggcaacgttcatggaaaccacccacacccaggtgtgagtgaaggatttgttaagttatgctacatctgaaagtgtgatacaacacagctggtggcagtctctagaccagatgggtctaaaggattggcaaaccacagctgtttgggcaaataaagttttattggaacatgaccatggctgttcactcttgggtaccaaggcagagttgagaatctgtgacagaggtttatgcagcctgcgagcctggaatatttaccatctggccctttaagggaaagttagccaattctgggttatttattaatttgctaattagcaaattagtttgtatatattaacatggggaagatgttcaggaaatatcactatgtgaaaaatatcactaggtgaaaaggtaaaaagtgccacgtggaaaaccagtgcctcattcacgcggtgtcgcttcccttcgcctcagcatgggcagcttcccccccatgttgggaactagggccccctggagtggaaaggctgagattccaggcagccttgatcaattcccgtgtgcaggcccatccatgccttcctggccagtttgcggtgtgggttcaagctacatcccttctctggatttgggtctcctacttgtactggcgtgggtttcgcctggcagaaccctgaggattttagctgtgtgtcttcctcgggggtgatattgctttcgccgcccctgtccaccctgggagtgacggtgggggtcccctacctgcccgctgtgaagcaggtcccgttagcagcaccgatggttgaaaatgccacaaaaagtggaacgatccaagaagcaggatagagaacacggtcaccaaatgtctggtgagagaagcgagatgagtcctgagggtctttcttggcctccaagagcggccggcccccaaaagctattctggcctcccaggggacccagggacccacctcgcctcggggcacagcctctgactcctccactgcagaggagagaggagaacgccactcgcctatctccagatattgtgatggcaagagaagtctcttatctactactccctggcataaatctttatttatttatttatttatttatttatttatttctgagatggagctttgctcttattgcccaggctggagtgcaatgttgctgtctcggctcactgcaacctctgcctcccagggtcaagcgatgctcgtgcctcagcctcccaagtagctgggattacaggcgcatgccaccacattcagctaatttttgtatttttagtagagacgggatttcaccacgttggccaggctggtctcaatctcctgaccttgcgatccacccatctcggcctcccaaagtgctgggattacaggcatgagccaccatgcctggccaaatctttattttttaatttgattttttttggagacaggatcttgctctgtcgcccaggctggagtgtagtggcgtgatcacgtctcactgtagcctcaatctcctgggctcaagtgatccttgcctcagtcttctaagtagctgagaccacaggcactcgccaccacacccagctgcgtaattcttggtcatttcaatatcctgacaccttcacctctcacttccctgaacccccactccaaccggaatggctgaattctccctcccacctcagcagcccccagtcttgtggtcagtgacctcaacacttatccaaactgcgtctcctccaccttccaaatccccaacacgtggttgtctgtttgcaactgcaggaggcccccagccacctcttcactgaccccaatgcctctcacctctcaccttctatgattcattattatttagggtggtgcaaaagtaattgccagttttgccaaaaatatatatattttttaatatataatgacctaatataatgacctcccccgactccctggcactttctgcctctgcttcatgcttgcctgccgaaccctcaccctggctagcccggccctgcctccagctccatgccgtgcgtgcccagtccatgtccccgtccgtgaatatcgccctccttccctgggagggagctcacctccagtgctgacacctgccttaccccttcccacaagccacagcccccgccagcagcgatgcccgggcactcaccacagccaccgcctgggactgcaggagttcggtggcagtcatcacggtgaagtaggacacgttcatgaggatgtagcacgccgtcaccagggggatcccgatgataatggccaaaggcaggtttctgggaggggcaatgacacggagacccacgttcagaccacagcctcccgcggaagatggacgccctccctgaggccctcccagggagaagattcgcaggtagcagaggcccagcaggaacataagacattttcaaatgagaatgctgcctctctcagactccagagcagttcacatggaactgtttataaagcaaaataagccagagataaaggaagaccaagctcttccctcccttaggagccactgctctgtcccaaaccaaaccaaactctaagcgtgcatagtgagctcataagaaaccattcgctggccgggtgcagtggctcacacctgtaatcccagcactttgggaggccgagatgggcgaatctcttgaggttgggagttcaagaccagcctggccaacatggcaaaatctcatctctactaaaaaaatacaaaaatgagtgagctgagattgcaccactgcactccagcctaggcaacagagcaagactctgtctcaaaaaaaaaaaaaaagaaataattcactgtcgggaagggcatcatggaatacccagggaaatagctccagccttcaccaggagaagagaaatcaggctgcccggctactgtcctctgcactgattcagctgttacctgtaagggtttctaagttcttctgtgatgtaattgagttgattcctggaaaaaggaaagtaacaagcgtcacacaccttgactttctttttcgataatgaaacccacaataataaatgttggcctcatttaagattctctaccagagaaaaaaattctcctgcaggaattccaggtgaatttttttccaggtgaatggccctgctagtggtggggcctggggccctacccagacctacacatctgtcagctggttgagcctttgccctcctcgggaatcacacggattttcaagaataatcaggagtagtgagtccccagggtgctttgaaaaaatggaatattctttgtctgaaaagggaattaaatctataaatgctttgcaggagagaaggaccatcgttgcagatggccatgcttcttccttaaaggacaaaaatgggccaggcatagtggcgcacgtctgtaatcccagcactttgagaagccgaggtgggcagatcacttgaagtcaggagttcaagactagcctggccaacatggtaaaacctcgtctctactaaaaatacaaaaattagccctgcatggtggcaggtgcctgtaatcccagctagtcgggaggctgaggcaggagaattgcttgaacctgggggattcaagcaattgcagtgagccgagatctcaccacagcactccagcctgggtaatagagtgagactccgtctcaaaaaaaaaagaaaaaaaaggacaaaaacagaatctcatccactaaactcgataaatatataaaatttatatggtattatttatttttgtagggcagtcccccaaaccataatagattcagagaggctcccaaacctaatgattttcaaggttaaatagaagtgctattgagtattctttgtttaatcaagagcttggggctgggcgcagtggctcacgcctgtaaacccagcactttgggaggccgaggagagagaattgcttgagtgtaggagtttgagagcagcttgggcaacacagagagactgtctctacaaagcataaaaataaaaaattatcagggcatggcagctcctatctgtagtcccagctactcaggaggctgaggcgggaagctgacttgagcccaggagctcaaggctgcagtgagctatgatcacgccattgcactccagcctgggtgaccaagtgagatcctgtcttaaaaaaacaaaacaaaacaaaacagaaaacctgagcttgggccctggctgcctctgatttggctgagcctgtgttggcccagtgagggttctacacagagcactctggctgactgagcaggtgtctcagggaataaaggggagaggttgtcgcatccttcacaaaaaggaaatgtgagggtgaatgtcagagtcacaccaaaccccagaaaggagaactcattgttttccatgacaggtggagttaaagtcacctggagaaccccacccacccccagactcgggacatctcaggacacctcaccatccatcataggcccagagtccattgtaaaacgccaggctgatggctcccacagacagctgggcgccctcgaaagaattatcaaaattctttgtgtttcctgtaatgaagccagacagtgaacggcgggtgtcaaccgggcagatcttgagtgtatctccacgggaaagatgggcatgattgtgaccccagcttaataaacacgccctgaaactaaggatccctcccaccgagttcctgccatgcttccttggagatgggctcgtggggcaaggctgctcctgctcccagtggaagggcgtttggtgtgtgcccgtgcagggcccaccctcccgtgggtcaccttgggccaggagcaccagcccgctgatgatgatgatggccacgatcaccagcttggccgcggtgaagatgttctggacgtagcttcccagccgcacgctcagtgagttcactgtcgagatgaacactggaagggtggggacagtttctgcatttatggttttcagcaaagccctggagagagtctcctttcttttatatattttttatttttttttttttttgagatggagtctcactctgtcacccaggctggagagcagtggcatgatctcagctcacgatctcagcaatctttgcctccccggttcaagcaattctcctgcctcagcctcctgagtagctaggacgacaggtgcacgccactatgcccagctaatttttgtatttttagtagagagcttgtctggaggttctagcgggggagcgcagctactcatatacccttgaccgaagaccagccctcctctatcggggatggtcatccttttccaccgagtgcgcagcttcgggagggatgcacgtggagcagtgagggaggaagaggacactggcctagccagccagatcacctgaatcaaccctggcgatcagtggggtgacagatgtccctgccagatcgccctcatatccaatttttgtaattttatttttatctatttatttatttgagatggagtctcactctgtcgtccaggctggagtgcaatggcacagtctcagctaaatgcaacctccacctcccgggttcaaggaattctcctgcctcagtctccccagtagctgggattacaggcatgcactaccccaccacccccctcccccgccctgctaatttttgtattttagtagaaacagggttttgccacgttggccaggctggtctcgaactcgtgacctcatgtaatccctccaccttggtctcccaaagtgctaggattacaggtgtgggccactgcacctagcctcttttattttttgagatagggtccaaggctcaagtgatcccccctcctcagcctcccacgtagctgggacgccaggtgcatgccaccatacccggctaatgttttgattgtttgtagagtcaaggttctcactgtgttgaccaggctgatctcaaactcttggcctcaagcgatcctcccacctcagcctcccaaagtggtgagattccaagcatgagccactgcctgcggcccacccctactcccccaccagccaccatatcatctcccaaattccaagagggcagatccaaacatgggagtttaaggaccttttaaaagaacctggagatgaccttagccgggctgcctcagatggcgaaaaattatcagggcgtggtaagcagcctcccgagtagctgggattacaggcacctgccaccacgccaggagaagctgggccctgagccaaggctctgccctgcaggacagccagcggcacccctccctgcagcccccacgggcctgggggtccccagtgtgcagcacccacaggtactgcaaaggctgatgccaggccctgcctgggctctcaccagagactcactggggaggagctgagggcggagtccccagacaccctctgtgccaggtcttttctgacccctgccctgggctcaggtactcacagatggcggcggcggccaggcatttcacaacgatttgaggaggcttgcagcccacatagaagggcgcacacacatactcggagaagctgaggcagatgatggcgaaggacgtgggcttaatgacgatcaggctggcccaggagaagaggtaggcggggatgggcccgtaggcctccatcaggtagggatactctccccctgacttggtgatcattgtgccaagctccgcaaagcacagggcacctggaacacagagaggaagggcccacaggccccttgtgaggcactgccccggccccagggagccttcctcccaccggaggctgcgctcgtatggaggggcccaccgtggtccgccctcgctggacggccctgagctccagcgttggacattcagtccagcctgatttacacctgtttgccatacatgtgccaagagggatactggcagggtgagggctggcacaggtagcagctgcctggcgtgcccctgcatgcttccggggctgcaacaggctcccaagtctctttacccagcgtcgcgaggaccccgcaagccgcccatatgatgaggcagggccccacagcttccgtgttgctgagcacagacttgggggaaacgaagatcccagagccaatgatggtgcccacgatgatggagatgccactgatgaggcccagctgggtgtggaggaaggaagagggcgttagtgccacgcccggacccagcccagaaggccaggtgccaccctccctcggtacggccagggcggccccagccaaagcccatgtcccaggcgcttccaccctgagcggctgccctggcaacaccggggcaccgctcccggagctttgcttatgttaacgtgattaattatcgtgacagccccgcgagctggccacactgtgtcacccccatggacagaggaggacgctgaggcacagaaagattaggaggctgtccggggtttacagctagagagggggaaacctggctcaggttccacgtgcctaaccgtgatcctgtgccctcaatgaaaaggctgacttggcaacagctcaccaataagaaaggccctcgggatacgcctctgagcctagagtcctggccagaggctccatgcagggtgagcaacggaggcctcccagaaacagaaacatttgggcactctgaactttctgtggtgccattttcttttatcttatttttatttacttatttatttagagtcagatctctctctgtcacccaggctggagcacagaggtgagatcatggctcactgcagcctcgaactcctgggctcaaacaatcctcccaactcagcctcccaaagtgctgggattgcaggcgtaagccgccgtgcctggcccagtgccatttgctaggatgggagctttctgagaacagaacccagctcaaagagacaccagatggttccatgcctgtgaagttcaagaacaggtgaaactaatccacagccacaggaattcagggctggggccctgcctagaaaggggcacgagggagctttctggggtggtacatctgtcaaaactcaccaaactcagcactaaagagctgtacatttcgaccaggtgcagtggtttatgcctgtaatcccagcactttgggaggccgaggcaggcggatcacctgaggttgggagtgggagaccagcctggccagcatggagaaaccccgtttctactaaaaaatacaaaaatcagccaggcattttggtgcacacctgttcctagctacttaggaggctgaggcaggagaatctcttgaacccatgaggcagaggttgcagtgagccactacaatcactccagcctgggtgacagtgagactgtctcaaaaaaaaaaaaaaaaacctgcacattacactgtatgtaaattacacaccaatcaaggaggaaaaaaaagtccaactcaagccctactcataacactcgtcctcagaagcagccccggccagatctccagagcctgaagtttccagcacccatgttcacctgtctgggaagaagctgggcttggagtcagatcgcaggggatgaggggctcccagctgcaggctgccaccctgaggactctgcacacaccagtgggatccctggggagcagcgtctgctttcagggccagggcgcacttccaggacagggcggggatgggctcagctctcctcctcatctcagccctgcccaggactggcagtttggctccagaatcctccctcctgctgagggactgcctgggttctgatgtgggtgaggtctgcattcgccctgaagctgcctgactgaggagtagacccagctcagatttttggtttttagagtcagggtctcgctctgtcacccaggcttggagtgcaatggcgcgatcatgactcactgcagcctcgatctcctgggctcaagggatcctcccacctcagcctcccaaagtgctaaggttacaggcgtgtgccgccacacctgtccccagctcagaagacacatcttggggatttctcagctgtgctctgtggccactggggcccaccagggttctaagaggcccttcctgagatcaggcctgagactggcagagagggaaagtgctgcagcccatcgtctacctcctgggggtcccaggccaagccattcaggccattgccagccctccggtcaagccctaaagccttggtgccgtccctcctccatcccctctgctgccaggcatgggagctctcggaggccctgcccacacctctgccctggaagcggaagccatcctgagctcacctggagctgcctttcctcatcctaggagcctgaagccctccctgcgcctccatgctcagcacctgctgctcccaactgcctgggactggcgcagtgtgctgtgttgagctcctttctgccttccccccagccccaagctccctttccctgcaggcccagggccagccccagctgctcactgcagcccaactcagagcagctgtccctggtagatgcctctaagacagaacaggctatgctgggggcagtacttcccatcactacagccattcagatataaggaggacaggcatttagaggggactcaaccatcagaacgccctctctggctgggcacagcgactcacgcctataatcccagcactttgggagcctgaggtgggaggatcgcttgagcccgggagttccagaccagcctgggcaacacagcaagatactgactctacagaaagaatttttttgaaaagttaaaaatttggcagagcatggtggtgtgctcctgtagtcccagctactcaggaggctgaggcaggaggattgcttgagtccaggaggttgacgctgcagtgagctatgattgcaccactgcactccagcctgggtgacagagtaagaccctgactctaaaaaaatttttttaaaaatttttaaaaagaacgccctttctgaccattcctggaaaggccattagtttgaacaaaaatactggcccgtctagacacttgctcaacacacaaaagcacctatttatgaacttaaaataatatgcgggccgggcaagttggctcatgcctgtaatcccaacactttgggaggccgaggtgggcggatcacttgaggccaggaattggagaccagcctggccaatatggtgaaacctcgtctctactgaaaatacaaaaattagccaggcgtagtggcacatgcctgtagtcccagctactcaggagctgcttgaacccaggaagcggaggttgcagtgagctgagatcataccactgcactccagcctgggtgacagagcaagactctgtctcaaaaaaaaaaaaaaaaaaaaaaaagaatatgcagccgagtgcagtggcacacgcctgtaatcccagcactttgggaggatcacctgaggccaagagtctgagaccagcctggccaacatggtgaaaccctgtctctactaaaaatacaaaaattagccgggtatggtggcgggtgcttgtaatcccagctactcgggaggctgagtcagaagaatcccttgaaccggggaggtgaaggttgcattgagccgagatggcagcactgcactctagcctgggtgacagagcaacactccatctcaaaaaaaaaaaaaaaaaaaagaagatgcagaattccctggcgagagggaaagagaagtaagtccagagattatccctttaaagatgtacttcacaaatcaaagagtacatcttctgccgtgtcactagggatcggcccggatttcactgcctgcgcccctcgttcagacgcccttgcctaacctgcaaagggcctgccccaccagagaccgccttacctccttttggagactggtggtcttaggctcttggctctggatcgacttctcatcctctctccgctttctcaggccagtatcccccatgtttcctcctgctggttccaggagactgcaaggagggcgcacagctaaatcttggttcagcagcagcagacaagacgcaagtgcaagctcggcctggactaggggagctggctgcaaaagcacagtgttggttattgctgcaggtgggggccgctgccagtccctcagggctcatgcgctgggccccagagtcaaagtcagtcattaacattgtccaggcaggggaacacagctccccgctgctctccaaagctcagctgcttgcttagctctctcccagacaggccccgggagcctcctggcccacgtgcctgtgccttgaaagtcattctacctctatggtcaacttcattttttttcaaaagtaaaaagaaatatttaacaacatcccgggctgggcacagtggctcaggtctgtaatcccagcactttcggaggccgaggtgggtggatcacttgagcccaggagtttgagaccagcctggctaacatggcgaaccccgtctctactaaaaatgcaaaaaaaaaaaaaaaaaaattagctgggtgtggtggtgggtgcctgttaatcccagctactcgggaggctgaggcaagagaagcacttgaaccctggaggcagaggctgcagtgagccaagatcatgccactgcactccagcctgggccacagagcgagattctgtttcaaaaaatatatatataaaaaattaaaaaatgaaaatattgtggaatgtatttatcagaatcaagtccaggtaaggagtgtctgtcttataattccttcccaagattaaaggcactcccatacatcacagatccacaatacaggtactttttctttgtactttttaaatttttacaatattttttataaagacgggagtgttgctatttgccccggctggcctcaagcagtccttccacctcggcctcccaaagggctgggatttcaggggtgagccaccacgcctggccaggtactttttcattgagtgatgaaaggaaagaaaacattgccgaggaaacccagttccagactgaactaggagaaaaccatgcactcctgtaccctctctctaaataaattatctgtccaggccccggccaggagagccatgagcctttctatcacctactgaccttacttaccttcctccgtgaccctgcagagccggaggagctgcggcccagctgaccgcccgtgcctgcacggtccaaccctagaaatggccatgtcttgtgcccaggagcaaaggaagtccagaaggtacagaggtcaataagggtaattattaaacacctttttttttttttttgcaatgaagcttagatacgccacacaaaaaaggggagggtcaggaacaccaatttctctccaaaaccgtttttgttttgttcatttgtgtctaggtcagattatttttttaaaaccagatggtcccaaatcgtctacactttttacctaaagataaaataaattatgccttcttttatctttgggaatcagaggagataaactttggaaccaattcgctaattgccttaataggctatatttaaaacccaagtcaggcagctcaaacaggaaccgctgtgtgtgcgtaactcagctgttggtcagtttcctccccgcccaggaatttcccccaagccaagggcctgcctctggctgagcaggtgagagcggctgagcccgtcccactcctctttaccagtgatggggcttcaccacttggaatcacaagcaggcctgaggcaatgcagggcctcgtgtcctccctgcagctgcggccaaatgcccatcaggtttggctgtggtgctgttcacgtagccatgtcctggctcatcacaagggacacaaaaccttccccttcggggaaacggagggggacaggcaacacaaggccaggaagctccggtccgcatccagggctgccagggtctggatctctctgggagggagcagaggttctcccgcactgcgattggacctaggctcaggcggcagcctcaggggtcagcacgaagccctttcagatagggaaggaagcaccttatgagaccttatgagacagcctggcacagcataagcactgcatctgaagcatcgtagctgttaccttcagccaaaactctggtagctttgccttgggccaaacttaactgcatcccagatatcagatggaagcaaaggtcagggatggaaggagctgggccagtctctgggggtcagtttgggagcagtttggggcaagcagacctgagagaggcacaggtttctctgaaagccgtctgcagagcacagggacccttgttgtcccagaggcacggtcctgatttagaagttcgtcacctcccatcttgggagggcccacctgtttacctgcctgccatgcccagagccctgagcagagaggctagtggcaggtcctgccaccctagacagaacctgcccaccggcttgctggggtcactcctcctaatgttgcagcactcatcatagtacctggcacatccatgtttgcaaaacaccacagaataccccctgggtcaaaagtgctcctggcaggctgacaggagaccacgtgaggacatcagggtggggcagtggtcccccgctggggccagacagccctgcaacctcacccactacccacatgggctcaggcagcactgccaggatcagggtctgaacctgcgacgcagggcgagcaacaggcgcctcctcacggaacacactgaacttgcatgttccatgaatgtccgggaccagccctctggtcttcctgggcctcttccaagtgccgagtctggaacatcgggatgtgagggtcctttgttaagtcagaaacctccacttcagttcattttgggtccacggtgagcatttcttaagcctgtttcttaaagttgtgtttttcaccgcagtcccaccctctccctcccttgaatacacagaaagtattcaagtaattctcataagctcttcctcatggaaaataatacggatttcatttaaaaagcaaaattttcctcagttcttgaagaccattggttcattgtgtatccagtgcttctgccatgtgactgaagtttcacctccctgctgtcaatttttttttttttagatggagcctcactctgtcgcccaggctggagtgcagtggcacgatctcagctcactgcaacctctgcctcctgggttcaagtgattctcctgtctcagcctcctgagtagctgggattacaggcatccaccaccatgcctggctaatttttgtatttttagtagagatggggtttcaccatgttggccaggttggtcttgaactcctgacctcaagtgatccacctgcctcggcctcccaaagcgcaaatcctactgtcatttttaccattttatttatttatttttgagacttgctgtgtcacccaggctggagtgcagtgtcatgatctcagctcactgcaacctccgcctcccaggttcaagcgattctcctccctcagcctcccgagtagctggtactacatgtgtgacaatatacccggctaatttttgtatttttagtagagacagggtttcatcatgttggccaggctgatcttgaactcctgacctcaagtaatccacccgcttcagcctcccaaagtgctgggattacaggtgtgagccaccacacccgcccaaccactctatttcttaagtttctgctaaagactcttgaccttcattttcaacccgtgctttttcccttccgattgcaaaaatgcttgcagtgtgaagatcttcacaccatctacattttatcttatatttggtgcacatttgatttcagttggggagggtaaaatgcttctctccacccttttgggttctttggttgggcttcgaattgagactaatgggaggaaaactgttttaattatgtgtatatgcaactgagtcccacaaaacaagagacttgaagaagggccagatgactaaaccctatatagcatcctgagctatataaggattaggggcttggggcttctggggcaggtagggactagtaatgggatggtgaggggaggaaatgcatggcgaataaaggtcgtcttgttatgcagatataagtctctcaggtaataaaagttgtctcttcctggtacagatacttgtactaatgtagatttccttcatgacatacatttcttttgcaaagggcagcttttcagagctacacctgttgtgtctgcagtttctcagaataaccagctcaaaatattccaaagaagtataatttggggtgatatatatctagtctcctacagtcatattttgggggtggtgtgtcctgagccccaacatttccttctcctgtgatggtttgtgtctgagacagggtctcttgctcccatgctagagtgcaatggcgtgatcatggctcactccagccttgacctcttgggctcaagtgatcctcccatttcagcctctcaaagtgctgagattacaggcgtaagccattgcacctggcctcctgtgatggttttaaagacgtctttaatcccatagtgtcagtccatttctgcacagcctctgggctgcccagctgggtgccttgttctctaattcactgtcctcgtgacagaggcaaggtcttgggcaaacattcaggcagaggctgaatcttcctttaccgctgaaagcttgttccagacctgccttcaagttttcaccttctcctattcattaagttcactcggtcttgtattccttcccactgctgctgacggtagcagttggggatttggagggggacccaaaagacagaaataactggcatactaccacagatagaagagttgtttgttcccttactacctgaattccaaccagaagaacttgtgatgagttagcgatgtgcaaagcctttcgatgtcagggacgtgctgtctagccataaaacaattagcaaggaaagcataaacataatttcaaaactcttatctaggaacaatctatatatatccaacaactattggaatagtacaattctgccttcgaactttgtccatcatttttatgtgttccaagtaatatggttttgcattaaataacctgcgtggggaagacagttgcagcatgctgtcaaaacacgacttcccatcctgctcccttccccaccgacctcgtcacgattcatggtcgctgcctcttttctcaaccacggtggccacacatgatgaaagttgtgatcgctgctgattttggggaaagagggttctgtgtcatcaaacatctttaataaagagttactattttgggggccgggtgctgtggctgtgcgcctgtaatctcagcactttgtgaggccgaggcagggagactgtttgaggccaggagtttgagaccaacctgggcaacatagcgagcgcctgtctttacgaaaagaatttaaaaatattatccaggcatgatggtgtgcacctatagtcccagctactcttgggaggctggggcaggaggactgcttgagtccaggagttcaaggctgcagtgagctacgatcgtgccactggactccagtctgggtgacagatggagactctaacataggaagttaccattttttgtaatcttgtttctgtctgcccagcatccacaacttggggggaactgtccctttctgtgggacactggtgggctaccaaccaaaagacctcacttctctggccacacaggagggctcaggatgtcaggtcagccaagaggccattgtctcccaggatttgctacctgagtgaagcacagggtaggctgacggtgttcaactactgagaccctcaccccaaggctattccagcttctgtccttctcaaaacatggtggaagccacagagtgtacatttccaaaatatttccttctttcccttaacattgggcagtatagttctgttgcttgcaacccagccctggtatgctacatatactacacacagacccttcactttcaaagaattattctttaataaaatactcaggaccctcctgaccaggtgaaatagatgctccaggctcctgatgacccaaggcagcaatgctgtcacctcagtgcactctccctgtctcatctataccctctgtagagtgctgacacacgggtggactgtggaacaaggggatggcggcccagagcacccagcacagacgcggggagccagcctgggtcctcagtagcaggtggcatgcccagttccaggaagcagcctcatgcgctccgtaggtttgaagtctccatagcccagcctgggtcctcactacctctgtcctgttgtttgcagacattgggcctgcaaagcagcccagcggggccctgcaggtgaatatcaactacaaaagccgcccttcttctttctctccaaaaccctcctacccagtccacccctagtcaaaaatgaggaaaagagccgagcctgaggctggggatggtggctcatgcctgtaatcccagcaccttgggaggctgaggtgggcggatcacttgaggtcaggagtttgagactagcctggccaacgtggcaaaaccctgtctctactaaaaataaaaaaaattagatgggcgtggtgagacacaccctgtaatcccagctattcggggggctgaggtgggagaattgcttgaacctaggaggtggaggttgcagtgagccgagatcgcaccactgcactccagcctgggtgacagagcgagactgtctcaactaaaaaaaaaaaaaaagccaagcctgggaggctggaagggcagcaggtttcctgcccagctttggggccatggactcacaccttgagaaaaccaagagaggcctaacaagctgtacccatcccctctcccactcctggctgcagccactccttacctgtggacccctgcccagctgtgacccagcagagaggtgccacaaacctgggcacactgagccctccccatgccgcccagccaagttttgagtggatgatgtttccagtcttactcaagaattcagatgtcagcccagccccatcccaagaggctcagcctcctgctgtgggatctgtatccggctcaagccctccctgctggaagagctgcttgggcccagggagggctctcctgagccacccacactggggactgtgcctttcattcccgccaacgatacaggtaggggagggggtgaggagccagtgacagctgcgctcgaggctaaatgctaggccaccctcggccttaaatctctgtcctctcaacacagttattgacaacaccaccaagcattgatgaggatgcggagcaaccggaacttgcgcggaggttggtggtgggaaagtaaaatgacacaaacactcaggaagcaggcctgggtgttatttcttttttaattgtctatataacaaaatccactgttgtcactgttttccagcatacagttcagtggcgttaagggcattcaggacagctctcatgacagactcacacccacatgcacacctggtgccccagcctgctttgtccactgtctccatttccccagggctgcttttactttttattgtattatttttgaggcagggtctcacctggttgcccaggctggagtgcagtggcatgatcatagctcactgcagcctcaacctcccaggctcaagtgatcctcccacctcagcctcctgagtagctgaaaccataggcgccatcaccatgcccagggctgcttttaaataatggcaaagccagcaaggctcactcgcgtgcctgggtcatgttctacagctgcttgaccaggaatcttccaatgccgtatgaaacctcaccaggaccaagaaagagaagggttccctgctcagaccagacacttgcagcatggggaaggaggagcccctcccagcagacccagttctcctctgtgcagtccggcctcatttcccacccaagctctgaccaaaccccctcctgctgctctgagtgcctgctgtgctcctgggggccctctccacccttctgtagctcctgaaaccttgtccactctgcaagggccggggcgtgccagttcctcccagaagcaccccaatgtttctgtcctttcctggaatctcacaagcacccaggtgcctctctgccttgcctgccccgccctccttggcatcctggactcgtggcttctctgcccatttcctatggcacccagcaggaggctgggcagaagatagtgtctgtgggacacctgcccttgccctggtcacagtgccatccaggagtccccatacttgcaaagtatgtttgcactgtgtgaaaaacttaaagcagaaacataagaacaaaagtggacacttctcaaaagaataaaatgtttgcataaaaggcagaaagacagggatgtcaacagtggttctctaggtcacgatggcgggagcagcattcctgctgacaagcactcctgccccgcgcagccacgctgggctgccgccgcctgtcagcctgtctacaggaggctgcagagcggccgtaaatgcctttgaaatagcatcacagttatttgttaggtcatctcctagggagatgatacacagttttcaatcccagtgagtctttctaccgcttgtaaaataaaattaaattacaatgattcaactgttgaacaagcttatagagtcataaaagaactatgattttctatctcacccttccgtctggcaatcaaagatcacacgtagaacttctacacatgaccaaggaccagtactggggcctccttcccacctgaaacaaggcaggacttcactgcgaggggctctgaaaaggagatgctgcagggtgccacccctgagtcccacagttagggtcctttgtagcccaatgtccccaagtccctccagcatgcctgggactgaatggtcctgagcggctggggtaattttcctgaggaggtggcacgtcatctaacacacatgggacagaaccatggccccctggtatgcttcttggtggtggcagtggggcagggactctatcttagctcaaagccagggctctcattacatgggtggggagctgtgtggctccagaatcaattaccttcccagaccaggcgcggtggctcatacctataatcccaacactttgggaggcctaggcaggaggattgcttgaagctagacgtttgagaccagcttgggcaacatagcaagaccccatctctaccaaaaaaaaaattttttttttttgagacaaagtctcgctcttgttgcccaggctgcccaggctggggtataatggcgtgatcttggttcactgcaacctccgccttccaggttcaagcaattctcctgcctcagcctcccaagtagctgggattacaggcacccaccaccatgcccagctaatttttgtatttttagtagagatggggtttcaccatgttggccaggctggtctcgaactcctggcctcgggtgatccgcctgcctcgacctcccaaagtgctgggattacaggagtgagccaccatggctggcctacaaaaattttttttttacaaaattagccaggcatgttagtgtatacctgtcatctcacctactcaggaggctgggatgggaggatcgcttgagcctggaggtcaaggctgtggtgattgcaccactgcattccagcctgggtaacagagtgagaccctgtctcaaaacaaacaaacaaaagtaacaactaaacaaaagagaataaagtacttgctcaggaggatagagaagggctaggggagagggcagaaaaggtttgtacaacttagagggcatgaacagcagcagcaccttgttttttttgaccaaacaagaaaaggcccccagagctcacgcacagctatcatcagggccggtgccatggcctggctcctcgggtgacacttccccatctgacacatggcacgagggctcagctgcccgcccaacccttccagcacttcccagctgcagatctaggagctggaaggcaggcctgctcagcaggccacctactcaccagagcagtgggtgtcatagaactcatctcagtggcaatgtggccagagaacatgccctggctaaaacagatttcagcagcacgttattaaaataaagcacaatgggccaggcgcagtggctcacacgtgtcattcccgcactttgggaggccaaggcaggaggacagattgaggccaggagttcaagaccagcctgagcaacatagcaagacctcatctcaacaaaaaagaaaaaaattagctgggcctgacagtgcacacctgaggtcccagctactcaggaggctgaagcagaaggatctcaaacatgtttgaggctgccgtgagctatgattgcaccactgtactccagcatgggcaacagagtgagaccctagctctaaaaaaaaaaaaaaattaaaaaataaagcaaaatgttatcaatggattaaactatgagaccatttatttcttccctgccctgcagcgttcagtgggcttacgcacctccggctgccaccatgggctgccctgcagggaaggcctgtgtgaggcagacctttcaggccagaggaggctacaccacgggctcccgcagattctagcaggtgggggcatgagacttcaggtcataggagcagacatcgcagccgtccagcaggtctgcctgagagacgccattgaggctgggggcaaccagagctctggggttgtcctgcacgcctgtcctcgtgagtgtgtcctggagaagttctcggattcttcggttttccctgaaggtagattcccaaataacttcaagttcaccttccatttctctgagggaaataagtttaaaatggcacaattttaaaaataatatagagcccatatgaatcccaaagtagcaagaactcaaaacagaagaacgctatcagcagggaacagagccctcggtgcctgggttctgaagcaagcgctcagtgtggaatgaagcagctggtgccctgggaatggggagcagcaggacagcccaggctggggctcagtgtggaatgaagcggccagtgccctgggaatggggagcagcaggacggcacaggcatttctcttccctctatgttctgcccttgactttggcgccagtgcaatccctgttttctctcaagaatgaacttgggcgtgtcgaataaggaactgcaggaactgcagggctggccttggccagccagacgctctagcacgatggcctggccacaggcacccacacagcccctcctgtgtcccgtctgcttgtccactgtgacctggccagcactcagtgaccttccacaggtcttccgctccatacagcccagagctaagagcgagtcagggggtgaggtgggggacctgaggagataagactcattgccaagatggagaagattggcctggcccatgtgccgggatggggaggccctgaggggccgaggcatgtgaggttggaaagagccacagggcagcgtttccagaaccaggatgcagtgccctgtggtgtgctggggagacaggacagatgaaggtggccacatcctcacagggccacagtccactgggaatagaccaggacacgagccacacctcacaaggtgcttagccccatcggggagcatggccaggctggagaggccagctccttcccggacactgccagatggttctggaaaatgttggaaactggatttgcaggtggacttcgcaccacggtttaaagagcaggacactgaagttcagggaggccagtgatgtgcccacttggccagagtcacttttcttgtgaacgttccttccttccaaggcccctgatgcccactgtgtggtaagaacaacttaattaaactatgtctaaaaaagccccagcctgggcaacatgtgagacctcatctctacaaaaaacttaaaaattagctgggcccacgtggtggcatgcacctgtatttccagctactcgggaggctgaggcagaaggatgacttgagcccagaaatttgaggctgcagtgagctgagattgtgccactgtactttagcccaggcaacagagcaagaccttgtatttaaaaaaaaaaaaaaaaaaaaaattccccagactttggttttctgaagatatttggtaaattatagcaatcatgtttaaatgtatggctgaactcgaaagaacaggcagtctctaagggcagaaaaaatgaagcctaaactgaaaccaaagaggcagacaaagtatcagttgctttgaggacaaaagtcaatgccaaaccctggatgtttgtagactgagagatcgtgcagatcaagagtgacagaaaatctcaggacccactcttgtccaagtttctcttcctactagaggcactgtgaaggtaggtaagtggaggatgtgaaggaccctcaaagaaaggaggggtgggtgggagacctgcagatcttcaaaggaaacctgttctgaaaggccaggcatcacctggggactagagccaccggcctgctctcaaatggatctggagtgagtctacactgttccccatgagtggggatccccaggccctgactgcagtgaatgaagagtttaaaaaagttgggcacagtggctcatgcttgtaatccctgctacttgggaagctaaggcaggaggatggcttgagcccaggagtttgaggctgcagtaagctatgatcacaccactgcactccagcctgggcaacagagccagaccctgtctataagtagtaataataataataataatagaaataacagaaataaaatacctaatcaaaaattaataaaatctctcaagaaaatgaaacaaaactggctcatgcctataatcccagctatactcaggaggctgaggtgggagaaccgcttgaatccgggaggcggaggttgcagtgagccgagatcgtgccactgcactccagcctgggagacagagtgagatgctgtctcaaaaaataaaataaaaagaaaatgagacaaaataaaaatatcagtgagatggaaggcagcagaaaaaaagagaaaggcaattagaggtgtgcattgattccggaagtccagttcaaacaagaggaatttttaaaagaataaagaagatgaggagcaaataaaacttgagaccaatattacattcagatcagagtaaaatgtagaaacaaaattaaacaatggaacaaataaaacaggcccagagggttttagcagaaccctcaatcagacattcagacatctctgcgggccatggcgcagggcgcatgccccacctgttctgctgcagcgcctggtccagcacctcctgcttgtccttcagcacctggtgcaggtgccgcatctcctgccggtactgggctgtcttgccggcgaagtcctcctgctgctccagcagacggtgactgatgtcccccagcttcagtgctgcctgcttcttgtagccctggtcgggggaaggactctgtgaatgaggggacgctgccaggccagggtggacagtgcctcctggctgtgctccctacccactccttgtgtgtcagagcctttaaaatctagcaaccccggataagtttggtctgggattgcaagtctggatcataaaagtcataaaaagtgacaaaagaatttcaggtacaataaaaccaaattttaatgtatataaagcctagttctttatatgctataaataaatgaaaacataaaatatcaccattggaaacagcagttcatgcttctaatttcagcactattacaggctgaggcaggcggatcacttgaggtcaggagttcaagaccagcctggccaacatggtgaaaccctgtctctattaaaaatacaaaaattagccaggcgttgtagtgcatgcctgtagtcccagctacttgtgaggcagaggtgggaggataacttgaacctaggaggcggaggctgcagtgagtgtgatcacgccactgcactctagcctgggtgacacagtgagaccctgtctcaaaaaaaaaaaaaaaaaattaccatcacagaacaaactggatgttcttgcaaattaatctacaactgtattttttccaggacaactcttatccctgcatcaactggtaacctaagaactaatgctgccactggtcagcactgtttcaccttgacaagacagcctcattgaagaatccaacaagggctgtcactctctgtcaccaaacagacagctgagatgaaagcccgctatttactttccttctttcgtttttactgtatagtactgaaggttctgaattttcctgtgagcattttttttctttttttttgagacggcagagtcttgctctgtggcccaggctggagtgcagtggcgcaatatcagctcactgcaagctccgcctcccgggttcacatcattctcctgcctcagcctcctcagtagctgggattacaggtgcccaccaccacacctggttaatttttttgtattttttttaatagagatggggtttcaccatgttagccaggatggtctcaatctcctgacctcgcgatccgcctgcctcggcctcccaaagtgctgggattacaggcgtgagacaccgcgcccggccgagcatttctaaaattattgtcacagagagtctgacatgtagtcccacagactcatttttttataagaagctctgacactcagtttatacattctctctgacccaagaattgtttagtgcacagtttttacacttccaagtgaaataactttttgttttttgattttgcttattaatttctgtttttaatatttgtgaccaacaaatgctggccgggtgcggtggctcacgcctgtaatcccagcactttggaaagttgaggcgggcagatcacctgagttcaggagttcgagaccagcctggtcaggagttccagaccagcctggccaacatggtgaaaccctgtctctattaaaaatacaaaaatcagctgggcgtggtggcacatctgtaattctagctactggggaggctgaggcaggagaattgcttgaacctgggaggcagaggttgcagtgagccaagatcacgccactgtactccaacctgggcgacaaagtgagactctgtctaaaaacaaacaaacaaaaaacaaatgcctacattatttctactttagggatttattgaggctttctttgtagccaagcaatgatcaatttttgtgtcttttatatatatgtaaatataccctgttgattatgttgttaaatcttctattttcttattttgtttaacatcttgatcagtcttggattaagagaggtggattatagctcctattaccaagtttccatttttctttgtatttcctgtagtctacacttcataaatttgctgctgtgttatttagcgcatagatactcacaattactatagatgatgatgtagacaggatctcactatgttgcccaggctggagtgcagtggctgttaacagacctgatcattctgcactacagcctcgaactctcagactcaactcaagtgatcctcctgctcagcctcctctacagggacccacacacccagctcatactatatattattaactgtagtcttttagtattataaaaatctcccccttttttttggtgtcatttagtgcttttggtctgaattctatcttggcatatgttaagatttcgacctttactttctttgtgtttgcagaaatctgggttatctctacccatcctttcaatttaaatccttcatgaatactttgttttaggttggctcttgggtctagtgtggaatagcattttgctttatgagccaatccaaaaaatattgttttccctaataggtgaattaagctaatttacatttacctataggacacatttctttggtctcaattttgttattttatgtttggttgttttatgtacatatttttaaaagattttaaactaatatagtctttttctttgcttttttgctgttataattctaccatttaaaaaaattaaaacaattttttttagaaacaggatcctgctccatgctctgtccctcaggctggagtgcagtggtgtgatcatagctcactacagctttaaactcctgggctcaagatcctcctgcagagttgggagtacaggcgctggctatcaagcccggctaattttaaacttttttttagagatggggtctctatgttgcccaggctgatcttgaactcctggtctcaagcgatcctactacttcagcctcctgaggagctgggattataggcacgtgccactctgcccagctctaattccactatttaggaataaagctcgattcttgtagttggctttattcttacgcctttatattacatgttcttagtcccctgtttttagatcgtatccattggttccctaacaaaagtaacaatacattagctcatgacaacgttttcttcacttttcccctccttctgttcacctgcttaagtatgcttaagctcgtaccacttggtttttcagctttaatgatatcccttgactcttattacctacgaagaaatcagcaagtgcaatctactttctaccttccttccccctttgcccatcagtttccttggttgtattattactacattgtcagaaaacatttacatacaattctatcagccttattcccgctctaagtcttattttacagttaaatatattcttcgctcactacaagttaattttgccgaagtttccccaattaactcttggttggcaggactcattgttgagacagggtcttgctctgttgcccaggctagagtgcagaggcacgaacatagctcactgcagcctcaaactcctgggctcaatcaatcctcccacctcagcctcccgagtagctgggactacaggcatgtgccaccaagcctggctaattgctgtattttttgtagagactggggtctccctatgttgcccaggctggtctcagactcctgggctcaagtgatctgcctgccttggcctcccaaagtgcttggattacaggcatgagtcactgtgcctggccattttctttatcttaaagtcgtatgtcttggtgtcaattttctgggtccattctgtgtcagttttccctaggtacataatgtgccctttcaggacatagattcaagtcttcttttatttcagaaaggtttttatgagttacagtttagagcagaataagccactgttttggtttcttctttggaggctctagaagtcagtctcttagatctccatcactgtccaccgaatcctttgcacatctccatttccactttcctgtctgtctttctcggttctagctgcatatcccttattgcgctgttatgacatctgtctccatagaattcagactgcatttcttaaaccgcttctctgtcccttctatttcttccctgggtcatgtcagttccctcccacaccctcctaggccttgctgcctcttcctgaggtcctgtgtctgctctgtgacatttcttcctggctctgactgcctcctgaagtcctgtctctccagctatctccagctctctagccagctacctagtggttcactttggagtatagttttgatctcctttgcggcaacacttttcctggtaagttttcagcagtttccgtcagtaggaacttatgcttctatttttcttccttttccttaaactgcttttatatgaaggcctctgaattcctctggaatgagaggaggttcctgggagggtgggagcgacagttgggccagagtgtccttccagacttcccatgttcccaccaccctccacctcgcagccccatctcccactctctgaattcagcctggtttggaggggcttctgcctgcatccctcagttcccagatctcgtcacagccccggatttccaaggtgatgtcctccctttgaagagtgatattttgcagggatttcctgaaatgtcacctctgatttctcaagccttttctcttcattccccccgaggccctggcctgtctaccttggggcctgctcacaggtgtctcctccgggtgagccggttttactattcctgttcagataaatggtaacgctatggattccccaagcaaggccaactactccgaggatcactccttctcttttggaagtaaaaagcaggaaaattagaaaaaaagaaagaaagagagaaaagaaaaaccccacagggggattttaaattactcaatacttccatgccgagtcccctcataaacagcatggcatagccccttccctttcagcctttctttttttttttttcttaaagagacagggtccctgccaggtgaggtggctcatgtctgtaatcccagcactttgggagggccgagtcaggcagatcacttgagctcagaagttcaagaccaccctgggcaacatagcaagacctcatctctaaacaaaaaaaaaaaatacaaaaaaaaaaaaatagccagacaccatggtgcttgcctgtagtcccagctacttgggaggctgaggcaggaggatccactgagcccgggagttcgaggctgcagtgagccattgtcatgtcactgcactccagcctggatgacagagtgagatcctgtctctccttttattggtgttttgttttgttttggttttggtttttttttgagacagggtctcactctgtcacccaggctggagtacagtggtgtgacctcggctcaccacagccttgaactcctgggctcaatggagcctcccccatcagcctcgagagaagctgagactacaggcaagcaccaccatgcctggctaactttttaaattttttgtagagattggggtcttgctatgttaccagactggtctcaaactctcgacctcaagcgatcctcctggctgggcctcctgagtcactgagattacagcgtgagccactgtgccttgcttcatatccttttttcttaaacagctatgcagtattttattgtgtgaatgaaccaaagtttattgaatgaggtgagaggtgctattctgccagcaaaaccttacaatacttttactctgtggactattagtgatgcacatgcaaaaggtgtcattttcttaaacacaaaaatccacagcagtgagcctgcattcccatctgaaaatgaaatctctgaggccaaataaccacttaccttgactttttcctctaactttcccaggcgaatgttgctttttatgactttattaagcactccatccttctcactttctaaacattttgcctagggagaagggtgataaatgggctctcagttttacagaaaaattgaaataacaaacaattattttgcaaagagtgttactgctactgctcacaatcttcattctgcaacctgtcctgcctcaaccccttccccacccactgtgtgagggcctgggcctcaggccaacagttgaggatgggcaggaacagggcatgtggggtgccctgctcgacacaaagagaagaattccagccccacagaccaggggaacgggagaggctgcaaaggtttccagaatgcatctctactcttatggaatctatctttccttcaatcgcatccaaggaataagtgccaagaggccaatcaactcataacttgactcatttgaacaatttcaaaattaaggataacataatatgaatgcacaatgccgtttctccaagccatacatgaaaggcaatacatccagcagagatgacatcatttgaagtcgaatgatttaaactaatatccaggttggacgtgacctgctacattctataaattaactatttcagatgctaaaataaaataagtaatggtgagcattctttccaaggtaggctagtggtgacaagtttgattttccagaaggaaagctaagtcacagagaaattgctccaggtcacatggaaaatccaccctagaagcaggatttaaaaagatctcaggccaggcttggtggtgtgcacctgtagtctcagctactcaagaggctgaggcacgagaatggcttgaacccaggaggcggaggttgcagggagctgagatcgcgccaccgcactccagcctgggcaacatagcgagattctgtctcaaaaaaaaaaaaagatctcagtacctaagactattgtgtctcccacaaaaatgtaataaatgcaagatggtgcagtcatacttggggaaactgaaagtgatttttgttttttctttttgttttatttatttatttatttatttttgagacaaagtctcgctctgtcacccaggctggagtgcagtggtgcgatctcagctcactgcaacctccacctcctgggctcaagagattctcctgcctcaacctcctgggtagctaggactacaggcacgcgccaccatgcccagctaatttggggaaaccgaaagtgatttgtagccagaggtcatcagcagaaacttcccaaggcagagtggagtcctcccactgttggtgtatgtacagggttgggtaagggctctcacgagctcctggagaccaggatggggtagggcaggagtacgtggctcagtcctaggacagggcagagactggcagagcagccactaacacccctggacctggctagaggggctggcctaggcactcccagggtcaaggggcctgcaaggctgtagggatgtgtccactccagacctggctacagaggaccaagagccctgcccagacatcctggcagctcccatgcctctccctgcatggatagcgggtgtctgcttggacacaaaagtccctggtgacaggtggagccaggatggaagaaagcagctctcccacaccctacatttccgctttgactctgaggggcctgaggattctaaacttgacagccaggccatgataaaggtcaaggcaggagaagggaacacattttactaacagtttgttggctcaacaagtaacttttaaatatctggagacagtcagtggcctccatttgtatttccatcctgggcccacaaatattgggggtgggccgagaggagagtgtctgagggtctgggaggatcctgacttcgttgtggaagcctgtgatactccctggcccatgggagaggcatggggcctgcaccccagggaccgggattccctgcacgtcctgccctacaaacaagacggctttgcgtttacagtggcctcaacatgtggcgggcaggttcccaggaaatctctggatgaaagggtttgttcggccctttagatttttcagcaagctttctcttgccctctccatgtcccggtgaggaaggccagcacacacagcagcagaagggaaaatgggcacttaatgctaccacagagagtgccagggttcagctgcctttcagaggggcagcgctgggccagacacttgagtgccttcaaggctccatccatgctgtgtcaaagtcaaattgctttctggaaggctctggaaaggactcagaagtcaccagtaaagtatggccagactgaccacactcttatcagcaattattgtaatttaaaaaactgttttcagccgggcacggtggttcacgcctgtaatcccagcactttgggaggctgaggtgcacaaagtcaggagatcgagaccatcctggctaacatggtgaaatcccgtctctacctaaactacaaaaaaattagccaggtgtggtggcatgcgcctatagtcccagctactcaggaggctgaggcaggagaatcacttgaacccaggaggcggaggttgcagtgagccaagattgtgccactgcacttcagcctgggtgacacagcgagactccatctcaaaaaccaaacaaacaaacaaacaaaaacctgttttcaggaggaaggctcagggtggctggctggaggcacaggatgtcagactcctccacacaggagaaccaaaacaggagtcagtcatcgcacggagaacatctaacggagaccacgggaactcgacaggggagggctgggcggcacccgcgcaatgaaggagagggagacgacagcccagacaggatgggtcttggtcgggagcctggagaggctcccctgtgtcgggaaagggtgagagatccccaggggtccacattctcaccacacactcctgtgatcccagccccaggggagcccctcaacccctgcaggccctgagactggtgcagggagctccctggagtctgtgtgaccccactgctccagagcgggggctcacgctgggtcccacactgacccaggttccaggtagctgcagcacagtggcatcattttgagagtccagcccccaccagactacatcctgccctgggacccagcagcccctgcatctccacatccctggagcgccacggacatctccccacatgcacccggaaggctgcagcggcgaggcaccaggtggacccagtggagcagcgggtccccagcactctaccctacagtgtcctgcatacccagaagagtgtggtgcagtgcactgaagaggctgcccatgagagcaagggagccgaagcaagtgctccccaatcctgaaacctgcctggctggggcccctgtcactaacagcaaccccaccccctccagccgcagagccctgcgcacgtgcatgtgccctgaagacaggcttcccctgcccaatgcctccattgccaaagcaacccaagcacaccacccagggcctggggatcaccccatcctcttcaccacagcctgcagggagtgtcccaccatgttggttgccccaggcacacacacaaacacacacacacacacacatacaccaatacaaaaaattagaataagtgactgttacacttgatttgcagaaatcaatgaaaggacataataaacatgacaaagcaaggcaatatgacacctccaaaggaacataataattctccaacagcagattccaacaacaacaaaaagaaatttatgaaatgcctgaaaaagaattaaaaataatgatattaaagaagctcagtaaaatataacagaacacaaataaacactataaagaaatcagaaaaacaattcaggatatgaatgaggaattcatcgaagagacagatataaaaaagaactaaacagaaatcctggaactgaagaattcaatgaataaaataaaaaatacaattgagagcttcagtgatagactagatcaagcaggagaaagaatttcttttgctttttaaatactcagtgagatgaaagagagagagagagaaagagagagagaaacagagagagagagagaaaaggagcaaaagaaagagagaaaaattaaaaaaaaaaatgaagcatgccttctggtgttccaaggggtgaaaagaagtttaatggcataaaaaacctactcaacaaaataagttgaaaacttcccaagtctagcaagagatttcgaaatccagatataggaagctcaggttcccaaaaaggtcttctcccgacgacattatagtcaaactgtcagaagtcaaatacagaattctaaatatatatatatatatttagacatacatatatttagacatatatatttagacatatatatatttagacatacatatatttagacatatatatttagaatatatatttagacatatatatatatatatatatatatatatatatatatatatgtctagttacatataaggaactctcataagactaacagcgtatttctttcttttttctttttcctttttttttctttttgagatggagtctcactctgttgcccaggctggagtgcagtggcactatctcagctcactgtagcctctgcctcctgggttcaagcaattctctggccttagcccccaaagtagctgggattacaggcatgtgcaccaccacaaccagctaatttttgcatttttagtggagatagggtttcgccatgttggccgggctggtcttgaactcctgacctcagatgatctgcctgcctcagcctcccaaagtgctgggattacaggtgtgagccactgtgcccagctaatagtgtatttctcagaagaaaccttacaggccaggagagaatgagacgatatattcaaagggctaaaagaaaaaaaaaaaaaaaaaacctgtcagccagccaagaatactatacccagcaaagttatccttcataaatgaaggagtaaagacttacagataagcaaacactgagagaatctgtcaccactagacccatcctacatgaaatgcttaagggaatcctacacctggaattgaaaggacgatatctactatcatgaaaacacatgaaatgataaaactaactagtagagcaagcacacaaatgaggaagagaaggaactcaaatgttatcactatagaataataagataaataagaggaaaaatgatacacaaaacaaccagaaaacaatcaacaaaatgataggagtaagtcctcgcatatcaatagtaaccttgaatgtaaattaattaaattttccacttaaaagatacagactggctgaatggatatcagaaaaaaaaaacacgattcaactatgtgctgcctacaagaaacacatttcacttgtaaagatccatacagactgaaagtaaagggataaaaaaatattccatgcaactggaaaccaaaagcaagcaggagtagctatacttgcatgaaataaaacaaactttaagtcaaaaactgcgtaaagaaggtaatattataataataaagggataaattcaataagaggacatatactctaaacatatatgcacccaacaccacagcatccaggtatataaagcaaatattattagatctaaaaggggagatagactacaatacaataatagttggggacttcaacaccctactctcagcaatcagatcatcaagacagaaaactaacaaagaaacattgaatttaactgcactttagacaaaatgacctaatagacatttacaaaacatttcatccagtaacggcagaatacacattcttatcagatatagaacattgtctagcatacactgtgtgttacgctacaaagcaagctcaacaaatttaaaaatactgacatcatgtcaagtatcttctcagaccatggtagactaaaactagaaagcaataacaagaggaactttggaaactgtacaaacatatgaaaattaaacaacatgttccttaacaatgattgggtcaatgaagaaattaagaagggtatcaaaaatttcttgaaacaaatgaaaactgaaacacaacataccaaacacaacataccaaaacctatgggatacagcaaaagcaatgctaagagggaagtttatagcaataaatgcctgcatcacaaaagtggaaagatttcaaataaacaacctaatgatgtacctcaaggaactagataaacaagaacaaacagaacccaaaattagtagaaagaaagaaaaaacaaagatcagagcagaactaagtgaggcagggtgaaacgttcttatagtcccagtgacgcaggaggcaggaggattgcttgaatccagatgttcaaggttagcctgggcaacatagtgaaaatccactgctaacaaactgaaaacctagagaaaatggatacatttctggacaacatacaacctacagaggcaggataagtaaagttatgagaccatactgacttgtcccctttagtgaagccccacatgctcctttctcagtgggctcctttcatgtgcgcccttgtatgtcagcacctaacttatcttagcaagataagtagtcccacaggatcccagccaactaccaggtggttacacgttcctgatacccaatatggcctaggaaaaagaacaaaaatcccttaatcgtaatgtagcttccccaatctccagccaatcaacaccaaaagcccaagaagctattaactaccaattcctgcctgggcagggctaaagatatctccagggtcctgcatgtacagctaggcacaaggtttagcttacagtgagcttttcctcattttaatagtaaaaaacacaccctaggtggaggttttatatgctaattatacatgtgatacatgttagagcatgtacatgctgagtgcatgcaccaaccatagttccacctttcacacttgacctcaccaatactttatgaatatgcatgcacagctcctgtaaagggcatccccttaaaatattagggtctgtctcttactctgtctctcagagtgacttctgctatgcaatagacttcttcacctgctcttactttggactagctctcaaattcttttgtgaagtcaagaacctgaactggcccattgacaacactaccaagattgaattaggaagaaatagaaaacttgaacagaccattaacaaataatgagattgaatcattaataaaaagtttcccaacaaagaaaagtccaggaccagatggtttttctgccaaattctacaaaccttacaaagaagaactaatacaaattctcctcaaactattccaaaaaaatttaagaggaaggaattctctctaattctttcaggccagcaataccctgctaccaaaaccagacaaggccacaataaaaaaagaaacctacaggccaatatccctaatgaacacagatgcaaaatcctcaacaaaatactagcaaaccaaattcaacagtacatcaaaaaaataatatgccatgatcaagtgggatcaagagatgcaaagacagttcaacatacacaaatcaataaacatcatagatcacatcagcagaatgaaggataaaaaccatatgagcacaccaatggaaacagaaaaaaattggataaaaattcaacatccttcgtgataaaaacacttaataaactagacatagaaggaacatacctaacataataaaggccatatatgacaaacccacagctaacatcataccgagtaggggaaagcaaaaagcctttcctctcagaactgaaactagttaaggatgactactttcaccactcttattcagcacagtactggaagtcctagcaagagcagtcaggcaagagaaagaaataaaagtcatccaaattagaaaagagaaagtcaaattttttctctttgccaatgacatgatcttatatttagaaaaaactagacttcaccaaacgactcttagatctgataaaaaaaaaaaaagtttagtaaagttgcagaatacaaaatcaatgtataaagatcagtagtgtttctatacaccaataatgaattccctgaaaaagaaatcaagaaagcaatcccatttacaatagctacaaaaaaatacctagaaataaatttaaccaaagaagttaaagatttctacaaggaaagctacaaacactgatgaaagacaatgaagctgattcaaactaatggaaagacatcccatgatcatggatgcgaagaattaacatcattaaaatgaccagactccccaaagcaatcagcagattcagtgcaatccctatcagaacatcaatgacgtttttcacagaaatagaataaacaatcctactttatacatatggaaccaaaaaggagcctgaaaaggcaaatcagtcctgagcaaaaagaacaaagctgaaggtattaccctacctaacttcaaaatacattacaaggctatagtaaccaaaatagcacagtatcagtacaaaatcagacacattggccagtggaacagaataaagcaccaagaaacgagcccacatatttactgccaactgcttttcaacaaaggcaccaagaacatacgctggggaaagggcaccctcttcaatacatggtgctgggaaaattggatatccatatacagaaaaatgaaattagatctctatttctcatcatatgcaaaaaatccactcacaatggtttaaagacttaaatctaagacctgaaactataaaactactagaagaaaacatagaggaagcactctaggactttagacaaaaatttcatggctaagaccccaaaagcacaggcaacaaaaacaaaaatagacaaatggaactatattaaactaaaaagcttctgtacagcaaaggaaacaatcaatagaatgaagagacaacctgttgaatgagacaaaatatttgcaaaatattcattcaacaagaggctaatacccaggatatacaaggaactcagttctctctgtctctctctctctctttttttttttaaggaacacaactcttaatagcaaacaaacaaacaaacaaaaccaatcccattaaaaagtgggcaaagaatctaaatagacattccccaaaagcagacatacaaatgggcaacaggcatatgaaaaaaatgctcaacaccacaaatcatcacagaaatgcaaatcaaaaccacaatgagatatcatcttactccagttagaatggctatcattaaaaagacaaaaaataacagaggctgatgtcaacctaaaataatcaaaagggtgagactctagtttaaagagagtttattcaagcacaaagtttgaggacaggccacccaggaagtagattccaaagaacagaagtctgtgttctgaagtgcacaagtttgggatcgctaataggaccacatgtaggaaagcttaacagaatttcagtgtctttctatgtaagactgaatgcatagttacaacaatctaattagttgaggcagtctttttctttcaggaaaggtatatttaacattccacattgaagatataacagtcatggggtcatgggtgccatctggtcttaggtagaagaacaataaaggaagcaagcagttcatctttatagatagatgagtgactggaaggaggagaaggtctggtctctggtttctcctagtcatttacaaaacaacagcaatgaggaagagaactaacctataagaagcagaatagccaacaagctacattgctcagtctccagggcttaacttccccctttgcataatacatttagagggtcctgaaattttttttcttttcttttttaaaattgagacagggtcttgttctatcacccaggctggagtacagtggaatgatcgacctcctaggcttaagtgatcctccttcctcagcctcctgagtagctgaaaccacaggcatgcaccactatgcctggctaagtttttcgttatttgtagagacaggttctccctatcttgcccatgctggtctcaaactcctggacccaagtgatcctcccacctcagtttctcaaagtactggaattacaggagtgagccaccatgcctggcctgaaattttactttattttattacactgatgaggatgtggagaaaagggaactttcatacactgttggtgggaatgtaaattagtacagccattatggaaaacagtgtggaggttcctcaacaaactaaaaacaattaccatatgatccagcaatccaactgctgggtatttattcacaggcaaggaaatcagtatatcaaagggatatctacacccccatgtttattgctgcacaattcacagtagcaaagatatgaaatgaacctaagtgtccatcaatggacaaacagataaagaaaatatgctctatttacacaatgaaatattatttggccatataaaagaacaaaaccatgtcatctacagcaacatggatggaactggaggccattacgttaagtaaaataagccagacctagaaagataaatatggcatgtactcattcatatgtgggggctaaaaaagttgacctcatggaggtggagattataatgatagctaccagaggctaggatgcatgtgggtatgggtgtgtttgtggggggctggggggcaggtggctgaatgaagagaggttgcttaataggtataagcatacagttagatagacgaaataagttatcatgttcgacagcagagtaggttgactaaagttaacaacaaagtattgtatatttcaatatagctagcaatgaggacttgaaatattctccacacccagaaatgataaatgctcagctgggtgtggtggctcacacctgtaatcccagcactctgggaggccgaggtgggcagatctcttgaggccaggaattcaagaccagcctggccaatgtggcaaaaccttgtctctagtaaaaatacaaaacctagccaggtgtggtggcatgcacctgtagtcccagctactcgggaggctgaggcacaaaaatgtcttgaacccaggaagcggaggttgcagtgagccgagatcacgccactgcactccagcctgggtgacagcgtgagactccatcttaaaaaaaaaaaaaaaaaaaagataaatgcttgtggtgatggatagcccaaatacctgacttaattgttacacattctatgcacattacaaaatatcacatgtacccccacatgtgcatgtaaatatatttaaaatattttttaaaatgtaaaaatattatgcattaataaaaagatacaattgtttaaaaagaaaaaaatgttttgtaacattttttgagaatggtatctcaagactggtttaattagcattttttttttttttttagggacagggtctttctctgtctaccaggctgcagtgcagtagtacagtcatagctcactgcagccttcaactcccacactcaaatgaacctcctacctgagtttcctgagtagctgagactacaggtgcatgccaccatgcctggctaatttttaaatttttttttgtagagatgggttctcactatgttacccagactggtcttgaattcctgggctcaaatgatcctcctgcctcagcttcctgagtagctgggactacaggcacacagcaccatgccagggtaatacagttgaaattttaaaatacagatggttctagacttacaacagggctacatcctgataaacccatcataaattgaacaaactgtatatcaaaaatgcatttaatcctggcaatacagcagatggttcccaacttatgatggttcaatctacattttttaagctttataatggtgtaaaagcaatgggcattcagtatcaatggtaacttcattatgagttgtaaggagttcctcaatttataataagattacttcccaataaatacatcataaagtcgaaaattcctaggtggaaccatccatcgtaagtcagggaatgcctggataaagcttttaatagatcattttttaaaatactcttaaaatcacatttgcatattaactcgcagtttacttgatgtaaccttcaggaaacttaccaaacacataagactgtcacgttcctgggttatgttttctgccaggccaacaaggtttgccaggtactgatgagcagacatttcgttccccatggctttttccacctgctttttgaggacctcaattttcttttgagatttcctagagagttaccccaaatggtagaataaaaagcccattagtttacatggctagggcatggtgaatatctgtattacaaaaacagcaagtatgttagcatttaaatgctattcttcagcaacctaaatcttctattaagtttcaaggtgagaagaggtaactgaatttaatttgaaaccaagcataattagtgaccccaactcaagtgaataagaggagttgcaaatgtctaacaatgaataggttcatttttttttttttttttgagacacagtcttgctctgtcacccaggctggagtgcggtggcatgatcatggctcactgtaacctccgcctctcaggttcaagtgattctcatgcctcagcctcctgagtagttgggattagaggcatgcgccaccacacgcagctaattttctgtatatatacatatatatatttttttaagtagccagggcttctctatgttggccaggctggtcttgaactcctgacctcaagtgacctgcccatctcagccttacaaagtgctgggattacaggtgtgagccaccacacctggcccataggctcattaagtattattctattaactttctggcttatgttctaaaaggcactttcgaaaaaaagatccagaaattccaaagtagacttttaggaaatggttagaaaagagctcctagaactttgaatcttagggttatcaatatgaccatcaaccatatttcaattatagactttagaaatgttggttaacattggttaacagcaacaatacttattataatctgatatccagtaatttcaattacccttttccattttatagccactattagaaaaagaaaagattaaaagaaatgaaatggaatattcttcatttgtctttttttttttttttgagacagggtctcactctgttgcccaggctggagtgcagtggcgtgatctcggctcaccgcaacctctgcctcccaggctcaaatgattctcctgcctcagcctcccgagtagctgggactacaggtgcgtgccactaccgcctggctaatttttgtatttttagtagagacggggttttgccatgttggccaggctggtcttgaacttctgacctcaaatgatcgcctgcctcagcctcccaaagtgctgggattacaggagtgagccactgtacccagaccatttgtcttttttaactattgaaaataaaagcaacttaaaggaaaaaaagacacaaacctattgattttctgtgctcgttcaagttcggcttccagtgctttgttttgctctgtcaaactgttcttctctaacagcaggctcttcttctgcgcttgcaggactgtcagcttctccatcaactcctccatctcagccctttctttctcttcttccttctgtaattggctgaaggacaaaaacattacatgctcgtatccagcacaatgaagctaaaatggggcagtcacataacgaggaagatgagtgataacagcccagccctccagcccctgggtgggtcacttggaatgcctctgtggaaacatctccccatcctgggccctagaggacctgggaccaagctgctagaccaccggagagagggtgtggctgggcacacactacgtgtgtgtctgtgtgagacagggtctcactctgttgcccaggctggagtgcagtggcacaatcatggctcactgcagcttcgaacttctggactcaagcaatcctcctacctcagcctcccaagttgctgggaccacaggcacacatgatacctggctaatttttgtattttttgtaaagatgaagtctcactatgttgcccaggctggtttcgagctcttgggctcaagtgatcctcctgccttagctttccaaagagctcggattacaggcatgagccaccacacctggccacaaacttctttgatggtgatgatctaacctctttttctcccacagttttggcttatgtctctgtctctctgtctctctctctctctgtgtgtgtgtgtgtgtgtgtgtgtgtgtgtgtgtatgtgtgtgtataccctattccttccaaaaaatctaagatagctctattttttacatggttataaatgccagatttatttaaaaaaaacctgctaaaacaatttttccataataatgtaattataaatacatgtttttaagacaaaagaaacaaagaacaaaggggcacttattttgctgaacaccagcttgggtgttaccgaatttgcatagagagtaacttgggataggggctgcatcctttaccagcgcagcaggaatacacaacaatatatgattttaaggtttgtcaactgtaactgtaaaacatacaaaatccaagattcatttatttcactgaaaacttatttaactattattttattggataaattgttgaactggattaacgataaaaggttaaagaagaatgttgaaaataccaagacttctgctttcagccaagatagagttacagagaccagatttactcctcagctaaaaaaccaggcaaaacagaagaaacaacagttttcggactttggacaacaggcgaggcaggactgtgatcccaaagggaagggaaaacaaggtgagtgctgcaactgctccctccaccttcttgtctggcagacacctgctgagcccaggagccagagatccaagagcaggaaggtcaaggcagctggaatttccagggcagggcagagggcgtttcacggagcgagaaagggctctagagaccttgaagggtctttggctgggtactgatctgtccgtgtgtgagaggaaactgcgtaaagcctaggaaagaaacactacaaacagtaggcagaacaatttctgacatgcacaaagaacaggaaatagttcataccccaccagtcagaatggaaaggccttataataaaagagatattggatagaatccttagaagagtgttactgtcttagcagtggggctaacttagccctaagactagaggttgctttgggcccaccctaacaaaaatcagctttgaaagaatccagcttagccacatgcggtggctcacacctgtaatcccagcactttgggaggctgaggtgggaggatcccttgagcccaggacctcaaaaccagcctgggcaacataacaagaccctgtttctacaaaaagaaaaaaaaaaagaaaacagaaaagaaagtaaacaaataaataaataatccaacaattctctagtggcttaagtgtgcaccagaatgaaatctaacactatttaaagcaatgcaatatgtctaacatcctgtaacataaaatctacaccatccagcacccaatcaagcatgagaataagcaataaaatatgatccatgatcaggaggggaaaaaatcaacagaacagattcagaagtgagagagatgatggcgttggcaaacaaaggtttttagaaaaacatgctcctacatttgagaaagaagagaaaaatagcatgctggggacagagacggagaatacaaaaaagactcaaatggatctttcttacagagatgggaaaaatcattacacaaagtgaacaatatattggatgggactaacagcagattagattgtagaaggatagatttgtgaagttgaagagagatagtaatagacactgtctgattgaagcccagagagaaacaagtgtgggctaaaagtgaacagaacagtcaacaggacaacatcaagcagtccaggagaggtgagagggaaaaacagaagagaccgttcaagaaataatagccaaaagatttccaaacttgatgaaaaatacacactgatagccccaagaagcttaatgaacttcatgtagagtaaagaaaccatgctggccgggtgtggggtcccccactgtaatcccagcactttggaaggccaaggcaggaggctccctcaaggccaggagtttgagaccagcctgggcaacgtaacaagactctgtctctacaaaagatttaaaaattagccgggagcagtggcacatgcctgtagtcccagctactcgagaggctgaggcaggaggatcacttgagcccaggaggtcaaggctggagcaagcagtgattgcaccactgcactccagcctgtccaacagagccagaccctgtgcaaaaaagggtctgaaagaaagaaagaaaccatgctaaggcatatcccaattaaaatgctgaaaaacagtgacaatgaaaaattcttaaaagaagcctcagagaaaacacacgttatcttcagaagaatacagataaccgtgacagcagattttcatcataaacgacgcaagccaaaagactatcaacagccagcatctttaaaactgaatggaaaaaaacccacaaactaccaaaaacctgtcagcttggaattcttcacccagtgaaatcatgtaatcaataaagtttcataattttcccaacggaagtactgtaaatctttccacatctatttgtgaagctttgtcgatggttccttccttttaattaaaaaaattttttctcatgatgatagcctatcattaccttagttttcaaaatatcattttctttcttccttttttttttttttgagatggagtctcactctgtcaccaggctggaatgcagtggcgccacctccactcactgcaacctccgcctcccaggttcaagcggttctcctgcctcagcctcccaagtagctgggactacaggcatgcgccatcacacccagcgaatttttgtatttttagtagagatggggtttcaccctgttagccaggatggtctcgatctcttgacttcatgatccacctgcctcagcctcccaaagtgctgggattacaggtgtaagccaccaggcctggcccaaaataccattttctacacatttttttcctacaaagaaatacaattaatttttataaattttctgttttgaacaattttgctaaaacctcttatttttaatgatttgtagatttgttttctacagatagaattatgtcatttatgaataatgacactattgttttcccttttcccaaaccttctaagtttttcatgccacgtgtgtcagttaccacttggtagccagtgctgttaatgttgtcagaaatggtgtcagagggcaaccttgtattgtttccaatctcaataggaaagctttcaacatttccctatttggtgtgatctttattgtagctgtattttttaatagaactttagaatgttagaatttaatagaagttttacatctacattcataagtgaaatgaaaagtaattttcctttcttatatgatcactgttgggttttggtatcaaggttatactaacctcattagattaaggagcattaattctttttctgtttctagaaaggtttatgtaagactgaaattatttcttccttgaatatttgtagagctctctagtgaaggtatccaggcctggagttttcaaaggaagatttttttttttaattcaattcttttaatgattataggactattcaggtattcttcttcttcttgagtcagttttaaggtaagcttttcaaagaatttgactatttcatctaaattttcaaatgtattgacataaattatttctaggtgcacacaaatttaaatttgtgtgaattctacttggtaaattgagccttttatctttgtgaatcatcctctttgcttagtattgttgtctgttctgtttgagacagggtctcactctgttgcccaggctagagtacagtggtgcaatcactgctcagtgcagcttcaaactcctgggctcaagtcatcctcctgcctcagcctcctgattagctgggattacagacggtaagccatcacacccagttagtttttaaatttatggcagagacaaggtctccctatgttacccaggctggtcttgaacctctggactgagccaccatgcctggcctaagtagtattttttaccttaacatctaccttgttagagattaagatctaccatgtctattttggtttgtacttgagtagtactgcttttcctgcccttttacttttgacctttctctatccttatgcttgggacatatatcttaaagacaacacagatgtgctttagtttacactgtgacattctttgtcttttaactggagcattttatccatttagcgtatctactgctggtatgtttggctttaaatctaacattttactttttgttttctattcgccccttgcccacctttcattttcctgctcttatttggattgttttttaatcattctttttacccccatactagtttaaaagttatatacattgtttccagaaatttcatcatgcatattttcaaattataaaattagtcaacacttttatcctcttctaatgatataaagactttagaacacaaactccatgtgccttgtgcctgattatatgctattattgttgtgccttttaattttatgtattcttaaatccccaaagatattatcattttatagacttagtgttcattacatttatctatatatttaccactatcatttactttcattttacttccttcttgcttctcaggcatcctgccttgaatcaaccatcccctcctcaggggcctcccttgaacactgtatctaaagcagtcctcctgactgcaagtctctctccatcttattatcctcatatatagatatatatataaatactaatagttacatatataaatatatatacatacatataatatatatataaacaacatctttaagagtaagaattcttaattttggctattgtgtgtttcagttctaaaaattctatttgtttctttttcaaatccactatgtcatgttttgtagttccctgaagaaattttagagcttctctgtctcaaactcctgggcccaagagatcctcccgccctggcctcccaaagtgctgggatcacaggcttgagtcactgcgcctggcctcacccaggactttcttaaaaccctcccagatgaaatgaaacacttttattccctgtggcttaaggaagaaagaccaggggccaggcatggtggctcatgactataatcccatcgctttggtaggccaaggcaggagggtcacttgagaacaggagtccaagaccaacctgggcaacacagcaagaccccatcgctgcagaaatacttaataattagccccgcacgatggcgcgtgactatagtcccagccactggggagactgaggcaggagaatcgcttgagcctggagttcaaggctgcaagtgagccatgattgagccacttcactccagcctgagacaagatgagatcatatcttaaactaaaagaagagaataaagataacacattttagtctaacattctgaggacagtccataaatgctttccctccaaacatgtctgtggtttctctattttttttttttttttgacggattctcactttgtcgcccaggctggagtgcaatggcgtgatattggcttactgcaacctccacctcctgggttcaagccattctcctgcctcatcctcctgagcagctgggactacaggcatgtgccaacacacctggctaatttttgtatttttagtagagatggcgtttcaccatgttggtcaggctggtcttgatctcctgacctcaagtgatctgcccacctcagcctcccaaagtgctaggattataggcgcatgccaccacacttggccaatttttgtaattttagtagagacaggcttttgccatgttggccaggctggtcttgaactcctgacctcaactgatccacctgcctcggcctcccaaagtgctgggattacaggcatgagtcactgtgcccggccccatttttatcttttctactgtattttgactgtactttttctgtttagatatgtttagatacacaaatacttaccattggtttatagttgcctgcagtgttcagtacagtaacatgctgtgcaggtttgtagcctaggagcaaacagctccaccatctagcctctgtgtgcaggaggctatgccatgtggctttgtgtgagcacactctgtgatacccacacaatgacgaaatcacttaatgatgagtttctcagaatgtatccccattaagtgacacacgattgtgttttgatagccccctagatgtaagtaaagaaggtataaaaagtttaaaaagaagtcattaatggtgaaggcagggggagaaatgaccattttaaaataacaaagatgccaccaaatcttttttcagtggaaattggagaaagacctttgtggctcagaatgaactggctggggagggaaagcctttatggcagctttggctgaacagctttgggctcagagtcgatagatgggtcaagggtagaggaatgagaaggatggagccgggagtgtgaccctaatgggctgtcccgcggaaggggcggtgtttggagagagaatttataacatggaagaggggcaggaattcatcagagctcgaatatgtggaattccatgaagacctagtgaaaaatagacaaaatgaggagtaggaaactgagtgtttttgttttggctacagaagctgaggacaccttggagctttggagggcacttcggagggcaagggagcagaagtgccctccgacagcctccactagggagccccttcccatgttggcatcataatagagataggccacatgcagaatactcactgatttatcagcaaagcagctgctgaaccagcgctcacaccgggggaatgtctggggaggagtttgggaaagggttatgcctcaggcaaaggtgaggtcatgaggacaagatttttgtgtagggataaaagggctcattgaacttgtgtggggcaagcctcgaggtgtggtgtgtatgtgttctttcacctaccctggttgaaaagaaggcaaataatgggtattttgtcttgctttctctgcccattggcaaccctgcatggaaggaacaatgatgcgggaaatggcacaagctcatgttcctggtgagctgtcagttggctttggattggactggcggtcacatgtggaagcagagatggctctctttgcttttactattttctagaaagattgggcttactcaagatgaaggtgggagaaaaacaaggtgtcaacccacttctctaaggaaatttagcaaactcttttggggagagctaaagatttaaggggacaggttgtatctacaaagggaagcctttatcctggcttgtgggagacctgtatcctaaagtaaagctgaccattgcatgcaccttatctatatacacagaggcctgctcagcagccagggagatgcctgcacagggaaccaccagggcagaaaatccctcaactgacacagtacacaccaagtaccagtagttcctcttcctaaaatcagaacagatgactagatgtgaacaagcaacaagggtcattaggcatgatgaaagaaattgcaacatgaaagagagatccagataagcagagaagctcaagggaaactgagataacagaggactaaggaagttttaaaagaacaaaatgccatgagaaaagaaagtacagtcactaaataagagccagactaaacatgattaccagaatttaaaaaatatcacaagggctgaaagatatatttgaggaatctctcagaactaaggaaacaaacgattgggaaatggagagaaaaggtactagaagtggaggacccatccaggaggtccagccttaggtcatcaggaacctcagaaggatacgagagacaccagaaaggaagaagtgaatagctgaagggcatctgcagacctctgaagaccttggtggattcactgcagaggtacccactgcagcgaatgaaaaaaagacccccacacctacacatattctaatgaaataccagtcaacctagattgatgagataggccagatgcagtggctcatgcctgtaatcccagcactttgggaggctgaggcaggcagaatgcttgaggccaggagttcaagaccagcctggccaacatggtgaaaccccgtctctactaaaaatacaaaaattagccaagcgtggtggcacactcctataatcccagctactcaggtggctgaggcacaagaattgcttgaacccagaaggcagaggttgtagtgagctgagatcgtgccactgcactattccagcccctgggtgacagagcgagactctgcctcagagagagagagagagagagagagcgagagagagagggagggagggagggagagagagagagagagaaatggtacacctgtacagggcacttaaccatgaatagagcttgcaggactggaaagaaattgctctgggtgagtcagtgagtggtgggtgcatgtgagggcctaggacattactgtacactctcgtagactaaatactgtacaattaggctacatttaaattatttttaaaattgttctttcttcaataatagattaattttagtatactgtaactttttactttataaactttttaattttttaactttttgacttttttataacacagcttaaaacacacattgtacaaatattttctaattttatattcttactctcaagcttttttctattaaattttttttaaactttctacacattttttaaaaaaatgaagaacaaatgccacaggagcctaggcctgcagagggacaggatcatcaatgtcactgtcctccacctccatgtctcatcccactggaaactcttcagggtcagtaacgtacatggagctgtcacctcctgtgataacaatgcctgcttctggacacgtcctgaaggacccgcctgagcctgttttacagttaactttattttgttataagtagaaggagtacactctaaaataacaataaaaagtagggtaaatacataaaccagtaacacagtcatttactatcattatcaagtattatgtactgtccataactgcatgtgctaggctttcacaggactggcagtgccgtaggtttgtttacaccagcatcaccacaaacacgagagtaatgcattgctctacgatgttacaatggctgtgacatcactaagtgataggaattttttggccccattataattgtatgggaccactgtcgtatatgtggtccattgttgactgaagcattgttatgtggtacatggctgtatgtttttgtagttatgacactgccacaaaaacacattggtcgcaggagcagatgtttgagaaaaataaaattataaagatgaacatgatttcaaaaatgtttccttcctctactacaacaaaaaagcacatgtctggccacacatggtggctcatgcctggaatctcagcacttggaaggccaaggtgagtggactgcttgagcccagctcaagatcagcctgggcaacatggtgaaatcctgtctctaataaaaatacaaaaaatagccaggtgctatggcacgtgcctgtggtcccagctactcaggaggctgaagcggaggatagcttgagcctaggaggtggaggttgcagtgagccaagatcgtaccactgcacttcagcctgggtgacagagggagatctcatctcaaaaaagaaaaagaaaagcacgagtctggcttagtcagcatgtaatagcagagtcaaaaccaggctccagtaattggaatcactagcatttacttaagcaccaagcttcacatgcactagctcatttgttgccccacaccaatgctatggagggagaaggaggagttggagagaaacagaagtcaataggtattcagtcaaccattttgagctgaaaggctcaccgtttaaaacattatttcccccttattacaaaagtgaataggacacttggaaatataaaaacatacaaaaggccaggctggtggctcacacctgtaatcccagcactttgggaggcctaggcaggcggatcacttaaggccaggagttcaggaccagcttggccaacaaaatacaaaactagccggatgtggtggtacatgcctgtaatcccagctatgagtggggctgaggcatgagaattgcttgaacccaggaggtggaggctgcagtgagccaagatcgcgccactgcactccagcctgggtgacagagtaagactctgtctcaaaaaaaaaaaaaggaaaaaaaagaaaattaaaattactcattgtgatggttaattttatgtgtcaccttggctcggctatggtgcccagttgtttgctcaaacactagacgttgctgtgaagtattttgttgatgtcgttaacatttacaatcagttgactttaaataaaggagatttactctcagtaatgtaggtgagcctaatctaaggccttaagatcaaaaacaggtttctcaatgaaggagttctgcctcaaaactgtaagatggagatcctgcctgggtttccaatgggctggcctgccatatgaattttgagcttgcctgcccccacaattgtgtgagccaatttttaaaagaaatctcactctctctctttttctcactatcctattggttgcttctctcgaaaaccctggttgaaacacttacaatctcatctgccaaagatatgttctattaatattttcccattctgccttttttctatgtacttacagtacatatgtaattttatatagctacacacatataattttataatttatataaaatatggccgggcgcggtggctcatgcctgtaatcccagcactttgggaggctgaggcgggtggatcacgaggtcaggagatcgagaccatcctggctgacacggtgaaaccccgtctctactaaaaatacaaaaaattagccgggcgaggtggtgggcgcctgtagtcccagctactcgggaggctgaggcaggagaatggcgtgaaccccggggggcggagcctgcagtgagccgagatagcgctactgcactccagcctgggcgacagtgagactccgtctcaaaaaaaattaaaaaaaatttaaaaaatagaatatataaatatataataataaaaaatataaatatataaaatattcatatataattatacaaaatattatataattatacatatattagttacacatattaattatgtatgtttcctatacataattatcatatataccatatgtatatataccatatctctctctcttacatacacacacatacaagattctttttgacatgagaaaatagccaccatatatatatatatatatttttttgttgttgttgttgttgttgttgttgttgtttcacaatgttgcccaggctgatctcaaactcctaggctcaagcaatcctcctacccggactattaccaattggccaattaccaattacatacataccatacataggtatatatatacacgcacatacacatgtaattatacaaacacatacatttatacatacatactagaatgatcaactcatttcactttgcctaggacattcccaattttagcactataagtcccacatcctgggaaacccctcagtcccaggcaaactgttatggttggttacacacacacatacacacacacttttttttttttttttgagacaaagtctcgctcttgtcccccaggctggagtgcagtattgcaatttcagctcactgcaacctccgcctcccaggttcaagcaattctcctgcctcagcctcccgagtagctgggattacaggtgcctgccaccatgcctggctaatttttatactttcagtagagacagggtttcaccaggttggccaggctggtctcaaactcccctcctcagctgaaccacccgcctcggcctcccaaagtgctgggattacaagtgtgagccaccgtgcccggccacacacacgtcttaaaaaataaaattgtaatcattttctatgtgctgttttaaaacctaaactcattacttaaaatatattgtggccaggcaggcacgcccctgtagtcccagctacttgtggggctgaggtagtaggagaactgcttgagtccaggagtttgagaccagaccagcctgagcaacattgtaaaaaaacagacatatggtggctattttcctatgtcaaaaaggatcttgtgtcacatcatatttaatgactgcatttccttccatttcaaggatatatcctttcatttaactaattccttattactggatatctaggtttccagttttactattttatttatttatcattttttgagataggagacagggtcttactctgttgcccaggctggagtacagtggcgtgatctcagctcactgcagcctcgatctcccatgtagctgggaccacaggcgcataccaccacgcctggctagtttttgtattattattattttttttggtagacatgcagtttcgccatgttgcccaggctggtctcaaatttccaggttcaagtgacctgcctgccttggcctctcaaagtgttgggatcacaggcatgaggcactacccccagcccagttccactattttaaattgcctttggttctaaaactaacacaggccaaaacagtatgaaaaaaaaatcacaaacacccaaagtgcagactgcagccctcaaggagagccaggctctactttaatttaccatttattaccaaagttattaaaagaaaaaaaaagtcaggctgggcgtgatggcttacacctgtaattccagcactttgggaggtcaaggcaggcagatcacttgtggtcaggagtttgagaccagcctggtcaacatggtgaaaccccgtctctaccaaaaatacaaaaattaggcaggtgtggtgagccgcccctgtaatcccagatactcaggaggctgaggcaggagaatcacttgaacccaggaggtggaggttacaggtgccgagactgcaccactgcattctagcctgcgcaacagagtgagagtccgtcccaaaaaaaaaaagtcccagtctcactttcagacacctgtgccactatgctgtgcatgaccataggtgaagaaacccagaaagaactgagcaacctctctccattctgcctataaccacaggcagagtgactcattatactcaaaaagtcattaaatcagctgggcgcagtggctcatgcctgtaatcccaaaactttgagaggctgggatgggcagatcacttgagcccaggagtttgggaccagcctgagcaacatagcaagaccctgtctcgaaaaaagaaaaaaaaaaaaaaagaaaaaacattaaatccttacctttttaattcattcacaattgatttatgaacttccactgcgattttgccatccgagtgtgttttgagttcttggcatttggcacgtaaaatctccagctgttccctgttctccgccagctccttttcctggccgtgggtttttgcctccaggagcattagttgtttagtcagcttagaaactgaaaatcaaaagaggaagataaaaacttggcacagaagacctcacaaaacacaattatgggctattaggaaatactaatgagagtcagctgataaaaatgaccttttaaagatcttttgagccagacgtggtggctcacacctgtaatcccagcactttgggaggctgaggcgggtggatcacgaggtcaggagttcaagaccagcctggccaagttggtgaaaccctgtctctactaaaaatacaaaaattagccaggcgtggtggcaggcgcctgtaatcccagctattcaggaggctgaggcagagaatcacttgaacccaggaggcgagaaggctcagtgagctgagatcacgccactgcacttcagcctgggcaacagagtgagactctctcagaaaaaaaaaaaaaaaaaaagatattttggagtgttataaattaacaccaaaggctttgtccttagaagttactgtccatactaggcacagtgactcatacctgtaaccccagccctttgggaggctgaggggagtattgcttggggtcaggagtttgagaccagcctgggtaacatagtgagaccccatctctacataaaaatttaaaaattagcagggcatggtgacatgcgtctgtggtcccagatatccgggaggctgaggcaggaggactgcttgagcccagaagttcaggactatagtgagccgtgactgggccactgcactccagcctggatgacacagcgagaccttgtctccaaaaacaaaaaccaaaaaagccaaaagaaattactatctctacattaagcactcactaaatatatactttttaaaataaaatccactataatattttaccaaacatgattccagtcttcaaggaactgactttcctaagagtaaagccttaaatcacacccaggtgtgtaagtatatgtcataacgttgtccctaaagctgcaaaattttcaagatttttaaggacatcaaacatggccaaactaagaactggatttattattctccttccctttcgtcattaaacttttattttatgtcttgtatctaaagtaagtcataaatattttcatcctgtgttacatggttgcatgtaataattcccaagcgtctgccgacactagcacttagaggtatttattatagcataaaactgtacatctctctactctatgaaaatatctaattggtggctgggcacagtggctcacgcctgtaatcctagcattttgggaggccaaggtgggtggatcacttgaggtcaggagttcaagaccagcctggccaacatggtgaaacacccctactgaaaatacaaaaattagccgggagtggtggcgcgtgactgtaatcccagctacccgggaggttgaggcaggagaatcgctggaacctggcaggcggaagttgcagtgagcctagatcatgccactgcactccagtctgggcgacagagtgagactgtctcaaaaaaaataaaaagaaaatatctaattggtcaaagtgaatcgctgtttctgggcaatgggaaaatagcacaggcaactcactgaatcatagaggtcaaaaggttttccctgccccatgtgaccagaaatcctctttctgttcagatctggtatattcaagaaaattaagctcagtaaataggaaactaatgtcatccctaaccctgaaaacaaagataagaggctccacaactctgtttcccctctcctcttaacaatgccggagtaaaggcaaatactcctgggccatgcaggtctcaggagaaatcacatggaggaaactcctgtgtgcatctctgggagatgctctcatctttaaacacgacctggttctcagaaacaggaagtgctagccctgcaactgcagcaacagcaggggctgttcatggacctgccatgctgtggaaggggctgccattccaaaagcagctggagagggaaaacctccatctgcttctcagggtgccacagcctcatgcaagatggcttgtgtttcagcttcccagcctatgccattcttcactaagaaagaaaaatcagtaaagcaaagggaaaaaatgccactatcttttgtactcatgaattacggttttaaagcagaagcgatgactcttaacctggcccccttacagttgtgcactgtcacagactatgaggctcctaggggttgggggaatgcatgggaagagatgggaagagggacactctcggaaggtgtttgatggaaatctaacctgcagtgatgtcgcctcccaggcccgcagctctgaaggaaggaaggacacaggggaactgtttagaaagtgaatggttctgcttacgcatccaacaaacatctgggaagagaccctgtgttatttcagatgtttacctcacgtgatcattcccatttctaaggtactattttaccccaaaaccagttctgctgagtctagcactattacctacgagtgatttacaaacccatgggatgatgagagacactgtggagtctgaaaaagcaatctatgcattgagggtagtgacgtggaaaggttataaacagccacattccagtcaaaaatgcaaaacatgacttctctcattttcaactggggcccccggcaggagagagatagaagggtaaaatgacaatagtgacatcaatgcatgaccagtcctcactggaaggacctcaccttcttggaggcgctcctggtggctgtccttggctttcctttgctgaatctccaactgctccagcaacaacttgttttcctctaaaaccagttttgcttgagtctgaagctgacgcctgcaattgatttacaagatgaaatactgtgattcaggtgctgaatggttacagaaacactctggaatctaaaaggaagcaatggctgcattacaggtaatgaatatcaagtcatgtcttcatgttaaacatattaacacagcagcaaatcctgccatttgcagtcaggcgaggaaggacagccgtgaagtctgaattacggactgcttcagaaaacgctttcagatgtaaaatttcaaacatgtacagaagtaaagaggatagagtaggagactcctatgtgcacaatacccagcttgaacagtcactaaatggctgatgaggtttcatctgtataaacctctagtcctgctgcccactatattattctgaagcccatatggaacatgtttaaagaatttagaaagttcccatttcaattttaaaatactcctttgtaatcagtagcatatttgcaaaacaaaacaaaacaaaaaaacaaaaaaaactgactctgttagcaggctttgaaatggtttcttttttcttttttctttttctttttcttttttttttttttttttgagacagagacttgctctgttgcccaggctggagtgcagtggcgcaatctcggctcactgcaagctctgcctcccgggttcacatcattctcctgcctcagcctcccaagtagctgggactacagatgcccaccacgccgcctggctaatttttttgtatttttagtagaaacagggtttcaccatgttagccaggatggtctcgatctcctgaccccgtgatctgcccgcctcggcctcccaaagtgctgggattataggcatgagccaccgcgtccagccgaaatggtttcttaaaactgtatgaatctgccccagctttcctctcagcacaaacaaatcctctccttccagtgcaatgtaaaacccagcccagctcagccctcaagatcgcaaattctgattagaatgagctgaagggaccttagaaatcatctagtgaaatgctgaccacccaaagtacactgggcgttaagtttatttactaaagcagtaaataatctcgattttccacttgaaaccctacaggtgaggaggaggaaggagagagacaagatgaaaggagtcaggctgtaacaatggtgtggccccaacagtggtgtgcactggctcctgggcactgtgggggtgcctcttgcctgctaccagcacccagggagtgggctgccatgctgttgggagggggctcgcccaaaactggtctgtgctagcctcctcattcccgccacaaactgggcagctccatgatggtctgttttatgttttagacttatttatttagagatagggtctcactctgttgcccaggctggagtgcagtggtgaaatcttggcccactgcaacttccacctcagcttcctgagtatctgggattagaggcatgcatcaccacaccaagctaatttttgtattagtatgttttggtagagacagggtttcaccatgttggccagcctagtctcgaactcctgacctcaggtgatcctcctgccttggcctcccaaagtgctgggattacaggcgtgagccaccatgcccagccgcattttggactaatttataagactttttctttatttgttcattcattcatttgttcacgccttccttcctcccttccttcattcatttcactttttattttttagaaacagggtcttgttctgtcacccaggcaggacaggagtacagtggcgccatcagagctcactgtagccttgaattcctgggcttaaccgatcctcctgcctcagccttctgaatagctaggactacaggtgcatgccatcacgcccagctaatttttaattgttttgtttttgtttttgtttttttgagacaaggtcttgttctgtcacctaggcacagtggtgtgatcatagctcactgcagccccgaactcttggcctcaagtgctcctcccacctcggcctcccaaagcattaggattacaggggtgaaccactaagcctgagccatttctttttaaaatgaaagggatcaatcccccattcctaaaaaagagttcaaaatctcagatttggtttaacactccctcttattttgttttatttatttatttatttattttattatttgagacatggtctcgctctgttgcccaggctggagtgcagtggcacgatctaggctcactgcagcctccacctcctgggttcaagtgattctcctgcctcaggctcctgagtagctgggattacaggcgtgcaccaccacacctggctattttttatatttttagtagagatgcggtttcaccatgttagccacactggtctcaaactcctggcctcaactgatcctcctgcctcagtctcccaaagtgctgggattataggcgtgagccactgtgcccagcctccctcttattttatagagaaagaaacagacccattaagcctgaggtcacccagtgattcagggggagttaggaaaagaaatatacaaaatttagttgcaccccagaagttcattgagaaattactggcaaccaagcagaaagcgtctgctgggccaggtgcggtggctcacgcctgtaatcccagcactttgggaggccgaggcgggcagatcacctgaggtcaggagttggagaccagcctgtccaacgtggtgaaacctcgtctctactaaaaataaaaaaaaaaattagccaggcgtggtggtgggcgcctgtaatcccagctactcaggaggctgaggcaggagaatcacttgaacccaggaggtggaggttgcagtgagtcgagatcgcgccactgcacttcagcctgggcagcagagcaagactctgtctcaaaaaaaaaaagaaagaaagaaagaaagaaagtgtctgctgaagtgtgaagtccgtgtaccgagtgctgcatgcaggtttagcagccgtgcaggtgtgcaggtaccgagagcggcaaggtctgcccaccaagtgtgatgctccagagcccagagaccctcctgcagctggagggcagtgaattcaaagtaagaggctggcggccagggaggccctgagcaagcctgacactctccccatgctggcgtgggccatcacactggagcaaagggcagatttcaaatcccaacaaatgcaggattggggaacactgcggggctgtggatttgaaagcagggcctgcctttctttcctttctttcactggttttattttaaggaaacgcagacaagttggatttgtggctgtatacaatgctagggaaggaatctggggttccagaatctgccaaggtctcttgagccccagcctggctaagctgctttccagtccactgttcaaggagggtgcgaggggagacacactaggaaccctgaaggaagaaaatccaagctcagccagggaggtcacagagcaccaagacccaggagctgcctgagccagtcccacctgacgcatcggtgaccacaaaatcagggagagccaatggtaagaatgctgttgactcaattccagatttctaaacatcacatatagaaaatacttcattttttccagtgatgttaagacatttgaaaacactaaatataacatagctattcaaagtgagtaatttttgttttcttagtcctgcctggatattgcttttaggcttttcaagacatgtactttctctaattcagttaacaggcatttgctgttgctgtgctagatgcggggccacacacaaaaatgagcaggacattggttcctgcccctgaggagttcacaaaggagaagatggaggcagatgtggaggcagacaggataggcaggcgcagtgtggcaggtaccgggacagggcatgtgtttaaggctacatcagaaccggagacaaaggggccgggtgcagtggctccagcctgcaatcccagcactttgggaggccaagacgggaggatcactggagcccaagagttcgagaccagcttgggtaacccagtgagactctgtatctacaaaaaattttaaaaaatggctgggcatggtagcacacacctgtagtcccagctacttgggaggctgaggtgggaggatggctttagcccaggaggttgaggctgcagtgaggtatgactgagccactgcactccagcctgggtgacagagtgagaccctaactctaaaaaaacataagaaacagagacgccaggcgcagtggctcacgcctataatcccagcactttgggaggccaaggtgggcagatcacatgaggtcagaagttcgagaccagcctggccaacatggtgaaaccccatctctactaaaaatacaaaaattagccaggtgtggtggcacgtgcctgtaatcccagctactcaggaggctgaggcaggagaatcgcttgaatccaggaagcagaggttgcagtgagccgagatcacaccgttgcactccagcctggccaacacagcaagactctgtctcaaaaaaaaaaaaagaaaagaaacagagacaagggagcaataatggcctctcctgaaggcagtgctatagacaagtgccattacagtaggaccctagaggatgaggagtgcagaaggggctttcggaggaaggacagattggaagtggggcaacctcagttgtcagggaatctgccagggcaggcggatggaagctggtcgtgcaagcctcatgagctttctgttttgggaggccattttgagctttctgttctgaaaccctgggagccatcgctggggcctaagaagggacgagactctccaggtctgagatggaaaaatcaccctagaaaaataccaactcagaaaataaaaagcagaaagcaactgtatttcaggtttgagaacctacttagaattttaaaagtcatcttgaaaatgtaagtttagaataatttattagggttttattgtaccttattaatttcttagaaactctcccgtaaaatattttagttaagaatgtaattatgtatttgataattttataacatattttcctgttaccatttgttttaaattagcaaaagagcagaaacacaatgccacttgccattcctcactggtaacagcactactcttatttaactcttggtgcaattcttcattttctttcaccacttcttggactcgcatcctaaacattctcatttcctcctgaaataaaatgtacgtaaattataacacacacatacccacgcatctatatttctcagttctggtgctgctgctgtggctaaaatcaaatggtaacagccatttagcaaggtctcacaacaggccagccttcaactctcggtaccagcaccagtggtgcctgctctcagggagcttacggtctagtgagaaagcactaggaccaaatgcaaggccaagtacaagaggcaaagaacctgggctttcgagtattagattcctaatttgctaacattgttctataactgccgaatactgatagaaaaggcagagatgcccatcaacgctgacatttttcctttgtttgaagatgcaggagaataaattggaggtttttaatataaaaaataagacttttcatccttaattaaagctagatttggtggggaaggggttagttagtgtgggagttggaggaagctctttttttttttttttttttgagacagggtctcgctctgtcacccaggctagagtacagtactgcaatcacagctcactgcagcctcaacctcctaggctcaagcgatcctcccacctcagcttcccaagtacctgtactactatgcctggctaatttttgtattttgtgtatagacgaggtttcgccatgttactcaaggctgctcttgaactcctaggctcaaggaatcttcctgcctcagactcccaaaatgctgggattacagtcatgagtcaccacatccagccaaggctcttagttttgtccatgacaaccatgagaaagtgtcttactagcgtcatcagtctgcagagcttcactggccattagccacaacacgaggtctgtcgctgggccggttttgatgcctaacagtctatgtctgtttcagctcccaacagtctgtgtgtgtgacacttcagctgagcctcctccatcagggcttttccagcttccgtgtcctgcgctgtcctttggtgagaatctgaggtgccaatatttactctggtgtgcctgtaaaatattctactcccagctgtcaggtgtttatgcctacacccttttaacttaaagcagcactgccaagtaacttctcctctcatctctccacccagacacactcactcactgctggcagtccatgtgactcttttttggaacaggggtcaggcaaactaaagtgtgcaaaccagctgcctgtttttataaataaagttttatttatttataaataaaataatgggcctcgcccattatttacatgttatcctcatctgctttcatgttgcaacagcagggctgagcaggtgcaaacagaaactgcatggcctccaaagcctaaagtgcttattaactggcccttgacagaaagtctgtgctgaccctgacttagaaggagcaccaaaaaaataatattattagctattaggattgttatatattcaattagtacaagattcattcatgctcttagaaaattaagcatccaacactcagtctaaatgaaaaggattaaaattcctttccatgggacatggacacgggacagcatcactgattaggaacaagctgggagcctcttaaaggaccctcccagctcaggatcccagaacaaccaacatttctttcgctggatccttccaatttcagggatctatatggacacttaaatgaggaacccagaggaatgcaggaggcacaggaggcatctacaacacctacacaggcttggcctcctgaagttagaacgagctccgctgcgcgaagtcattcccacaaaacggcggtggacaaggcagaaatggataaaaacctcacttctccatttccaacagctcagcaatcagacttccctggggtcagctcatcctagaattaagaagcatctaagtttgcccaaaacatctccagcctttccttcccatgtctgcccaaatagccctttttttttttttttttttttcgagacggagtctggccccatcgccaggctggagtgcagtgatgcaatctcggctcactgcaacgtccagctccctggttcaagctattctcctgcctcagcctcctgagtagctggaattacaggtacgtgccaccacaccagctaatttttgtatttttagtagagacggggtttcaccatgttgaccaggctggtcttgaactcctgacctcatgtgatccacccacctcggcctcccaaagtgctgagattacaggcgtgagccaccgcgcccagcccaaatgtcccttctaatggtggtatttgcagctgcacagtaacaggaaagaagcacttcccccctgctgtcttccctgcaccccaagatctcagcccatatgggctggctgtccagaaagccatggcttctcatgcagcactgctctgaccctccatacctctcccctcgctccctatccacccctcctgctctgccaatcactcccttacttcctcccctcttccttctttccctgcctcccaccctgccacactccttccttcctcctttctgtcctctaataaacatttggttatctataatatgctgggtatacctacattcaaaatgtttttataaaatttgaagcggtcctatatttttataaatcttgtgtcttctgggacatttgccagcctaccttgagggtggcattgagctcgtccttctctttcatcatatcttcataagccagcaacaatggtgacaggtactttatatccaactgaagatagagagtaaaggaaggttaatatatttcttacatctaaacacaaccagaaaatttttaaatggcaagaagttatacttttttgaaatggtttctttggttgcagttgttattgttttttaacgactctcccagctcaggatcccagaacaaccaacatttctctccttggatccttccaatttcagggatctatatggccacttaaatgaggaacccagaggcatgcaggaggcacaggaggcatctacaacacccgcacaggcttgacctcctgcggtcagaatgagctccgttgcccgaagccattcccactctgccgcccaggctcgcgtgcagtggcacgatctcagctcactgcaacctaaacctcccgggttcaagcgattctcctgcctcagcctcccaagtagctgggactataggcatgcaccatcacgcccagctaatttttgtatttttagtagagacagggtttcaccatgttggccaggctggtcttgaacccttgacctcaactgatccacccgcctcagccttccaaagtgctgggattacagacatgagccaccgcgcctggcctgaaatggtttttaatagctatgcaaatataccctgaaaatatgggcctgaaattaaataactttcacttaccaaccagggtggtatagggcccttggatgggaggccttcaatatttaagctctaagaacaaaacatgtattgaagacaagttaaaccacacttcctctgaattttcaagtcttagatattcttaatctagactgggcattgcccatctatgcatttatctgtctatccatctgcctacccacccacctacccacctacccatccatccatccatccatccatccatccatctatccatccatccatccatccatccactttcccatacacctacccatctatctatctatatgtatatatgtatatatgagagaaatattttttctgaaatgttttagagtaatttgcagatataatgccccttttcctctaaatacttgtatttcctaaaaacaaaaacattcatttacttaaccacagtactgtcatgaaaatcaggaaatcaacacagataacaatactattttcatatatatatatatattactgctccttgcagagcaggggtaccccataggcagtgtgcctagagtagcctataatactattttttaacctaacctaacctatatgttatcttcaaatttcatctattttcccactaatgttcttttctaatcaaggatccaattcagggtcacatgttgcatttagctgtcaagtcttttatgtcctttttttttccttctgagacagggtctcattccatcacccgggctggagtgcagtggtgagatcatggctcactgcaacttctgccttctgggctcaagcaatcctctcacctcagcctcctgagcagctcagactacaagtgcatgccaccacacctggctaatttttgtattttttgtagaaatggggtttcaccatgttgcccaggctggtcttgaactcctggcctgaagtgatcctcctgcctcagcttcacacagtgctgggattgcaagtgtgagccagcacacttggctttttttttttttttcttttttttttttttttgagacagtctcgctctgtcgcacaggctggagtacagtggtatgatctcggctcactgtaacatctgcctcccaggttcaagcaattctcatgcctcagcctcccgagtagctgggactacaggtgtgtgccaccacacctggttaatttttgtatttttagtagaggcgaggtttcaccatattggccaggctggtctcgaactcctgacctcaagtgatctgcccacctcagcctcccaaagtgctgggattataggtgtgagtcactgcacctggcctccagccctttttagtcttttaaaatctagaacatatctagtgactgttttcactggatatggaactttttaatgtcacattgttgagtgtctggattttgttatcttcctttaaagagtactggtttcttttccttccgcccttccttcctccctcctctctctctctctctttttctttcaactcctaagttgcttgtggatcaccttcatgcttctgaggcttgttttttcaccctggtcatggtaggtctgtagtaacctttcctaaaaagctcttttagccatacatctcaggcacggccctcctgggctcttgactcaatgcaaggtctctccattgtggctgggcagaactcgaaggttcccggtgctgtgtgagctctgggaaccatgcagctcacagctccctgttcttattttctgcccagtatcttgcagtctcatcctacacatgtgcagggtggtattccacaagactccaaggagccccatgcagatttatataagtagctctttctctccaggactccattctttctggtattcttgccctacgaattctagtctcctcagcttccccagactctcatctctgttgaactcagggaagggctcagctcaggcccttcctccctgctctgtgatctgagactgcctccagacagaaagcagatcacaggctcatctatttatcctgctactcttgagggtcataggctggtgctgcctgctgttcgacatctgtaaacatttgcattacatattctgtctggttttctatttgtttagattaggagggaaaatctagtacagaatcaatggcctagacaaaataattatttatttcacaaaagctttacaatgtgaacaccttaatatctatgtaattactcactcactctgcaaacattggcaactcactaagtcattatggacactgcaacgcaacccttgttttcaaggattctatgacctagtaacagaaataaaatccactaacacaaatgtacgtgatatacaaaaacagtatagggtagaatgctataagtgccttaagagtgattacaaacaaaagtctgcaatggtttaaaagagagagagggccgggcatggtggttcatgcctgtaatcccagcactttgggaggctgaggagggtggatcatttgaggtgaggagtttgagaccaacctggccaacatggtgaaaccctatctctactaaaaatacaaaaattagctgggcgcagtggaacacgcctggaatcccagccactcaggaggctgagaaacaagaatcacttgaacccgggaggtagagattgcagtgagctgagattgtgcatgctgcactccagcctgggcgacatagagagactgtgtctaaaaaaaaaaaaagagagagagagatcaatcacttctggctggggtgatcagggaagactgtcttggagaacatggcatttgcacagggcagaagacaacatgggagaaggctgtccctgggcctgtctgcccgccccatggtcctgcagaaggccctgacctagcaagcaggttttgaattataggaccctaagaactttatttgtttttgtttaaaagttagtattatgttaagtgaaagaagtcagtcacacaaagtcatgtcttgtatgatttcatttctatgaaatgttcagaacagacaagttcatagagacagaaaatagattagtggttaccaggggctgagctggaggaattgggcagcaggggaacatagggagtgattcccaacaggtatgacacttccttttttttccttttttttttttttttttgagacagagtctcactctctctgtcacccaggctggagtgcagtggcatgatcttggctcactgcaacctctgcctcccaggttcaagcgattctcctgcctcagcctcccaggtagctgggattacaggtgcgcacgaccatgcctggctaatttttttgtatttttagcatagatgggaattcaccatgttggtcaggctggtctcaaacgcctgacttcaactgatccgcccacctcagcctcccaaagtgctgggattacaggtgtgagccaccatgcccagccaacatttcttgatttaacaaaagtgctctaaaattgactgtggtgatggttgcataattctgtgactacaataaaaaccactaaatggtacacttttaaaatgggtataaattggatggtatgtgaattatatttcaaagctgttattaaaaaaaaaaagtgaaacgtaagccctccttcaaaaagcaactcagaagcccatgaggcctgaactcccaggagccatgggagaacaccgtgtgccttcccgccttctaccccagcaagagcccagccagcggtgcctccctctcctgtgtccacagtgtcactcacatcttcacagccccaagttctgtaagagtaaggacctgagcatcggttcatctggcactcctcccggcatctcatgcagtgacctgctcagtgagagtgtgtggagttggactctgcaactgttcttagaactgaaaactctgctttcctttcgaagttaatgcactgacaacagctgcaactttcaggaacgtgactgagaagggagcagccgacatacactttcattcttttacttttgttattttttttttaatttttgagacagggtcttgctctgtcacccaggctggagtgtagtggcgcaatctcagctcaccacacccttgacctcccatgctcaagagatcctcttgcctcagcctcctgagtagctggggctacaggcatgcgccaccatgctcagctaatttttttaaattttttatttgtagagactgtctcgccatgtcccccaggatggtctcaaactccagagctcaagcaattctcccgcctcagcctctgaaagtgctgggattataggcacaagccacctcatccggcctcttttactttgtacacttctgtattgtcccaatgttttacagtctttattgcctttattacggggaagaaggaagggaaggaggcaagaaacagaatggtccttagaaacattgtgccttggacagagcttttcttacatcaaattataataaataagaacctctcaagattggaaatcaattcaacagtaaaggcttaaaaatctgaaaagctgattttcacaatcggaaacgttacctcttccttggacaaatgcctgaattttgtctgatatcgactgagttctacattcaaacgatggacagtcattttcaatccatcattttcatccaccagttcttgagcttgttttcgcagataaagtaattcaggtgcagcaactagggaaaaaaatttaatattatactataagaaataacatccaatttatccagattttattaaattgcaaatcgtttgcttttctcccctctttcacgctcagaggcaatgaactgtgtgtgcgtgtgtgtctgtgtgtgtatgtgtgtctgtgtgtgtgaatgaataaaagttacaacgttttttaacactgaatagttaacgttatattgaaagtttgtggaagtttttgcatgtacaataaagtaaaataaaaatttcaagttggaaaggaatagtcattgtttcagatgacataagaatatgtgctttgaaaaatcatacagaggccgggtgcggtggctcacgcctgtaatcccagcactttgggaggccgaggcgggtggatcacgaggtgaggagatcgagaccatcctggctaacacggtgaaaccccgtctctactaaatatacaaaaaattagccgggcgtaatggcgggcgcctatattcccagctacttgggaggctgaggcaggagaatggcgtgaacccagggggtggagctcgcagtgagccgaaatcacgccactgcactccagcctgggcaacagagggagactccatctcacaaaaaaaaaaaaagaaagagaaaaatcatatagaatacatggaaaatgtattagagctaataaccttcccacataatagcaatgtcctattagaaaacaaaacagaaaatagatcccacaaggtaacagcacaaataatatatagtatctaaaaataaatgtgcctaagataagaattatgcagggtctatgtgaaaaaaactgacaccaccttacttaaagctatattagttttatataaatagaaaaaggtatagagaaaatattggtgaatatttatataaccttagagttaaaaatgacttaataccaagagtgtaagtcataaaagaaaaacattttattgatttagcccaattatcaacaaactaagaaaatattacacctatgacaaagggataaaatctttcatatgtaaggagttcctgcaaatcaataaaaagaagtcaagtgtctcattgtaaagtgggcaacttggccatgatagtggctcatatctaaaatcccagtgctttaagtggccaaggaggaaaaatccttgaggccaggagtttgagaccagcctgggcaacacaatgaggcctcactgctataaaaaaaattaaaaaaaaaaaaaacttagccaggcatgatggcgtttgcctttagtcccagctactcaggaggctgaggtggaaggatcacttgagcccaggagttcaaggttatagtgagctctgaccaccccactgtagtccaacctaggtgacaagagtgggatgctgtctctaaaaaataaataaataaagtgggcagctttatgaaagaaaaagaaaatgacttgcaaagatatgaaaaaatattcaagttcaataataacagaaatacaaattaaaatactatttctttttttaacctataaaagtagcaaggaaaatataatcattggtaagtctacggtaaaggaggagcttttttatgcttctcttagggataaaaactgaagtgaaatatatgtaagctaagcatcaagttccaaaagaagtattggaatctctgttttgtttttgtaaattcagcttctttccaacctgaggaatttctttagtgtaataatgatatagcagatgaaatcaaatctcaacaaacataaggatattaacaaaaaaacctgaaatattacaacataaattaccaacacaaatatcacaacataaaatattaactctcaaaataattgagtgaagtcctgctcattcctctaataaaggcactctgtctgtccccaccttcctgtgacgacgccttctcagcctctttgagctttctcttctctttttccattcccttaagttttaactgtagttctttcattgcttgtttcattgtgtttagttcaagggtaaggctttgattcatattgtttaggtccatattttcttcttttaatgcctcaaacttttctctggttatttctgtatatctttgacgtgctctaccagttatatctgaaagggttcaggggaaaattttacaatgttaattgatgttgacaatgttacatcaaaatcaactgactttgttccaaaaaccacatcaggcctggtgccatgttctttggtccctgggaagggaatggcttctacaggaaacagtaagtggcctgatgaagtcacagcgggtggcaggaagagaggtactgaggggaggccagaaagggaggccagagctgcaggaggccgtgcctattgtgatgtggcatggaaagttcatcttgcagggcagcaggagccagcagggctttcaagcaaaggtgtgagaaggaagaggctctgctcttgggtgaatccctcaggccagcagggaagaaggcaggttagaatgaggcctagcccaacagctgaggggcagcactagagtggggacacagagaaaaggacacatgagagcaggactcaggggctggtggctggctgggtgcgggcagtgagagagaagcagacccaggatgaccacccaggtctgtgtctggcagatgctcccccagatgaggagcacactgtgaagagcaggtggggatggaagatgaggagaggcaggcttgggttggtacagaggcccagagtcccagggcagcctctgctggggagactgacgagccactggcctgtgggcagcacctgaaggcaccagggtgaggagaaaaccgaggtcacataggaccttaagaaggaagagcaagaaagtggggtggaaaccagcgctgttccacggggagatgtgctccgaaaggtcacaggaggtgaggctcccatgggccctggccagcgcacctcccaggggagggagaggcggaagcagagcttccacacagacgagggcaggatggctggtggctccagagagcctggcccaacctctgacacacacatatccaatccctaacatgcaaaaggtgaggctcagaaatgggaaactccacagctacatagaaacaagggaaccctgagaaatcccagagataaaacagttgagatgagaatgaagatgggtgccaagcctgaaatgtgccaagagagggcagctagaaaatggggaggggtggctccagggatacaccttgccctggtaggagtggagacacaaagtggcctagaaagagctgatgaggctgggcctggtggctcgcacctgcaatcccagcactttgggaagctgaggcaggaagcttgcttgaggccaggagttcgagaccggcctgagcaacatagcaagagcccatctctacaaaaatcaatcaataaataaaattatatttaaaaagaagcagcttgaagcagctgatgagctgttgagttagataaccagagtgggaatagcaaggggttaacccacctgacccaggcagcaacagcagaaatgtgtgcccctcctcaggcagaacacacaggccctgagggcagaaaggcagggcagggggctggagaaagccaggaggaagaggggtccccacggatcccggtgggcctcacatcctgtccatccccatcagttgctggaggcagcagtcggtacagcctggcagcctgctggctctccctcttcaggcagggtgcagtaaacagaggtagcatccccatgtgggccacagggaatctcagagaccccaagaggtatcaaacagcagagccagagaacaccaatggcaagtgagagaagagaaggggctgcaacacaaaccctaagactggatgcgcatggttacaactttcagagagacgtagtcagtgtcacagaaatcatggaagttaacgtttgattaacaccataaactgaaaggatgggctgagccgcaggatacacatcatgaaaaatgaatgcatggcgcagaagttggagccccagcaatcgcccagaatacagcattgaaaatgctgagattgaaagggtgcaaataaagttaatctgacgcggaggagacttaaaccaggattttcagagcagtgacactgatggcagcagtggcccatctagagtggccaccgcacagactctagagcagggaggtgtggcccaagcctcttgctccatggagcaggcaggagccccggccctccctgggtgctgctgcagctgcccaagcccggctgcagacccgagaatctctgtgttcttgggggcccaagaaggcccccaccacccaccataggctccgaagtgcctgatcccactgcctggcttcaccccactgtgggcacctgctccagaggtatggtcagggctgcatgctccacagagccatcaggagccggggacaagcgggagccctgccccttctgagttggtggggcaggagctcatggggtgctgctacagttgccctcccatgtgtaggacctgggtgtctctgcagtctgcaccctcgggggcctgggaaggctcccgtgtccccgcaggcttatgggtgtttgctctagctgcctggtctctccctgctcctggtgcctgctccagtcttgcagcagggttggagcggggtttaggccaagcctgggcactgtcacagcctggctgggagtgtgcatactcagggcagtactgacacgacagcgccctgccgcctcagccccctccagactttgggcacccatgagcacaggagggaaagacaagggggtgctgaggatggctctgcactggcctgcagttgccccttggtgtgagcagcctgggtgccatggactgggcagcaggagggagacaggttcctgggcagaagcaggcaggtccccggtgaggccccgccttcaggtcggagagggcctgaaggctggggaccgggttgcctgtcccgtgggactgcagtaggaacttatggtgccttttccaggcccacccatggccacccatggaccaatcggtgcgcacttcctcccttctgaggcccataaaagccctgggcttagttggagcagagcagatgagatgaccagctgcagagaggagttcccctctctgctgatagctggagatgtcagaggaccagcagcagagaggagcaacccactccagggcctcctctctactaggagctggtcagaataaccagctgcagagaagaacaaccctctccagggcttcctctttgctgagagctgcagagacagttgggtgacctgccttcagagaggagccatcgactccaggggacctcctctctgctgagagctgaacacttaacgggacgacctgcctacagagaggagctacccactgtgggtctcctctgaactgttctaacatgcagtaaagctcctcttcgtcttgctcaccctccacttgtctgcttacctcattcttcctggacgcaggacaagaactcaggcaaaggcacactggcaccacagacatttccgaccagaaaagcgacaccccaaagatcttgtaacaatgtgggacctaacagcaaaaattataacctccattttggaagccactgaagctccccaaactgttcagggggcataacccataaagcatctctagacctctccctctgccttcagcctcagagcagagcccataactgcacctgccttcccagtacggatcccagtacatcatgggtccactcctcccactgggatcccagcacatcccacaggtcctccttccacccccaggatcccattacatcccacaggtccacctcccttcccccaggatcccagcatatcccacaggtccacgtccccccaggtccaacccccaccctcccaggacccaagcacatcctgtatggacatacgtccactacctagtgtttggaccctctcttttgaggcaagggtgaaagttcaacaactaatacaagaaaaagaaaatgtaatctttattttcagataaaattaatctggatattctccaaaacaagcttttcaatcataatataattcaaaaggcaaatacctggggagggtggaggtttctcacataatggaggtttttcatcctaggaaagaaagaacataagaggaataagtgcagagcattagtgttttataaagtggacacacgcagctaggtcattagacagcaggtatataagcatgctttatttccttcattttgactcttgttctttgtttgttttagctttcaaaactttaatatgtactatttctttttttccttttttaagacagggtcttactctgtcacccaggctagggtgcagtggtgtgatcgcagctcactgcagcctccaactcctgggctcatgaaatcctcctacctcagcctcccaagtagctgggattacacatgggccatcacacctaatttttttttttttttttttgtagagatggggtctcctgttgtccaggctagccttgagctcctgggctcaagggatcctcctaccttggtctcccaacatgctgggattacactgtttcttatacctgaatctgagaccttaagtgtcttcccctctggtgggctctctgaggctataaaggaagtcctgcctgagctttcttcctgcctttctgcactgagttcagtgactgtccttacaggtagatcccgtgagtagcgggctgtgggctcacgttgaaaagcatgtgctaggtagggctgcaagtgctgagcagagatgccctcagcaaactccagccaggcctcttctcactgggatgggcaaaaaggaccccatcaactgcagggaagcacatttgcaaaatgctgagaaaggaacagtaagatattgcttctcaaccccaaacctagaggaaagggaaggctgtgaacttttgttaatttttccttacatggtggtgtgatattaagtttctaatttctgctgacaaagtagacaaggttataaattaactctgcagagaaatgtttaatttttaagttcctatgacatcgcacaatgaaaaacttaagttagaactatttccatgtttgcaaattagttattaaaattctcaggccaggccaggtgtggtggctcacacccgtaatcccagcactttaggagcccgaggcaggtgggatcgcctgaggtcaggagtctgagaccagactggccaacatggtgaaatctcatctccattaaaaatacaaaaattagctgggcatggtggcatgcacctgtggtcctagctactcgggaggatgaggcaggagaatcacttgaatccaggaggcggaggttgcagtgagccgagactgcgccactgcactccagtctgggtgacagagcaagactccatctcagaaaaatatctcaggctaggcacgtcacatcatgcctgcaatcccaatgcccttgggaggccaaggcaggaggatcgcttgagcccaggagcttgagaccatcctgggcaacataacaagaccccatctctaaaaaaaaatttttttttaattagccaggagtggtggcatgtgcctgtagtcccagctactcaggagactgaggcaaaagaatcacttgatcccaggagattgaggctacagtgagctatgatcacaccactgcactccagcccgggtcacagagggagatcctgtctcaaaaaataattttaacaaaagataaaattgtctattcattccacattcattttaattataaagtagtttctaaccctttaatacattactttcatcattaaactatggaaaatatcaatttcctcatgttttaaaagtatttaaggccaggcacagtggctcatgcctgtaatcccagcattttgggaggtcgagatgggcagatcacttgagctcaggagtttgagaccagcctgggtaatatggtgaaaccccatctttatcaaaaatacaacaaattagctgggtgtggtggcatgcatctgcgatcccagctactcgggaggctgaggtgggaggatcgcttgagcctggaagacggagaccgcagtgagctgagattgcgccactgcactccagtctgggtgacagtgagacccccttctcaaaaaaaaaaaaaagcatttaaaagaaatattcaacaggaaagaactcttaagggaagatttatttttgccccaaaatcaccgccaaagtttcaacaccaaagttgttgaaaatttatgaaaaattatgataaaaactctatttattgagaaaatcagtttttaaaaaaaatgatcttacctttaaattcagaacagggtgtttaccatctgatgaagaaaaagagagagagataaacttttaaagtagataatgaaatatgacaactcagaaagtacaatcatagaaattcaccttctacagaggagctcgacaaggcccagaacagggataaaattcacagggtcacagggcaagtgggtcccagagccaggctggggcctgactctaaattgtcatctctctcccatacccatgcctgaccaccatccgtggctcacgtggctgcagaaccaaagccaaactcttcagtgtctccaagcccttcccatgccaggcttctcctctccttccaacacccctccccatcactctccacacatcttcccatgccgggctcctcctctccttccaacactcctccccatcacgctctatacatcttcccatgccgggctcctcctctccttccaacacccctccccatcactctccacacatcttcccatgccgggctcctcctctccttccaacactcctccccatcacgctctacacatcttcccatgccgggctcctcctctccttccaacactcctccccatcacgctccacacatcttcccatgccgggctcctcctctccttccaatactcctccccatcacgctccacacatcttgcccaccactccctggatgggccaacgcatactcctattggcctaccctccctagatgcatcatccaacctggtcagaaaaatagttgttccttgaagcaaactgtctcaacgacagagaggaaaacaaatctcacccacttactcatcttccacacatctgtaatccaggtaccctaggaagcaggtgatcttacaccccagtttgcctgtacacattcatgttgtaaaaagttggacatcgagttgcttttttttttttttgagacggagtctcactctgtccctcaggtggagtacaatggtgcaatcttggctcactgcaccctccgcctcccaggttcaaatgattctcctgcctcagcctcccaagtagctgggattacaggcatgcgccacgacacccagctaatttttgtatttttagtagagacagggttcccccacgttggccaggctggtcttgaactcctgacctcagataatccacctgcctcggcctcccaaggtgcagggattacaggcgtgagccactgtgcctggccctgagttgcttttaactttctactattaatttgcagagcagaaataaccagctgaaaataaactggaaacacatgcaaaaaataggtgaaaaaaccctacaaaattcagacaacagaagaaaatgctagagatacatacaagattctaaatctacttcctggttgggcacggtggctcatgcctgtaatcccagcactttgggaggctgaggtggatggatcacttgaggtcaggagttcaagactagcctggccaacatagtgaaaccccatctctactaaaaacacaaaaattagccgggcatggtggcacttgcctgtaatcccagctacttgggcggctgaggcaggagaattgcttgagtttgggaggcagaggttgcagtgagccaagactgtaacatgacactccagcctgcgcaacagagcaagactccatctcaaaaaaagaaataagtaaataaataataaatctactccctgatgcattgagcaactcgtcactgaagagctcatttttggccaaagtcatcttgatcaactgtttttaaccaaactgctttcagtcaaatgtccaggggcagcctggactgctctcctgcgttggacaccaggtgaaatcctgccctgtccttctgagttcagcttgatgaaccctcctttccctaccaccttccctaactgagagacaaccacctctactgcccaccttagcaccccagactacggtttgcaatctgcatctcctcctctgcagctgggatgcgaggggaaaggcctgtggctctatcatctctgacacacggctggcactgaacaaatttccaatgagcaaatgtttaaagtgatacaataagaaaaaatatatatttttaataacacctttacaatagtcttgatttggtatcacacaatgctacctcagatctgactgctttcatatttaatggagtcttctatgtcccccttaaattcttcacaaaataaaattgggggagcagggagttacatgaaatagaatggcaaaaggttgacagctggtcgggcacactggcacatgcctgtaaccccagcactttgggaggccgaggcaggtagatcggttgagcccgggagtttgagaccagcctgggcaacagagcaaaaccccgtctctacaaaaaataccaaattagtcgggtgcagtggaacacacctgcagtcccagctactcgggaggctgaggcagaagaatcactcaagcctggcaggcaaaggttgcagtgagctgagatcacgccaccacactccagcctggacaacaagagcgaccccgcctcaaaaaaataagaaaattgttgacagctatagaagtggggagatgcataggtggacaagtgggagttcattttactagtctctctacttttgtacacattaaaaatgatcacaataaaaagtttttaaggggcaattcaattttcccaaaggaaatcatgctattttatcttagtcatgaacttttcagaaaaagagtctcataaagattaaacttacaatttacagcatcccaaattcatgttgtatttaatgtacatttaatgtacacgcagttcacttggttctgtgaatctactttgtgtcctgtgttcttatttatcatttctcaaaaagatttccagagtcctcaccctcctcatttctattacctatatgggtgagggggatagacataaaataacagcaaaaggcttcaatactgggcatactcctgctgcatacaaggtgtcatgctgggtctattccagtcttttttttttttttttttgagacagggtctcactctgtcacccaggctgaagtgcagtggtggaaactgcactgcagcctcaacctgccgagctcaagcgatcttcctgcctcagcctccagctgccaggctcagatgatcttcctgcctcagcctccagctgctgggctcagatgatcttcctgcctcagcctccagctgccgggctcaagtgatcttcctgcctcagcctccagctgccaggctcaagtgatcttcctgcctcagcctccagagtagctgggtctacaggtgtgtgccattatgccggctaattttttacatttttgtagaaacggggtctccctgtgttgcccaggctggtctcaaattcctgggctcgagcaatcctcctgctttagcctcctaaagtcctgggatcataggcctgagccactgtgcctggccctattccaatctttatagaaagaaaattcacatgacatgaacacattcttgctgtcaaaaattttaatgacacagataaatcaaaattcacccatgaccataatccctcgaaaccttcccctctccagaggtaaccatggttatcaactgggtatggttcttttcagatatatttgagcatataaggatgtagtggctcatgcctgtaatcccaacactgcgggaagccgagatgggaggatggtttaagcccaggaggtagaggctgcagtgagctatgatcacaccactgtattccagcctgggtggcagagcaagatcctgtctcaaaaaaaaaaagtcaaaccccacaactcaccacgtttcacatgcctacatataagagacattaggtagtggggagggagagtagcatgtgcacaggtccagtggcaggaaggaacaccacagagttgaggaaataaaagaacagcagagtagctggaaagcagtcagcaggggctggcaggccaagcagatggtgggacaccatggaagagatccaatttaaaagggtctggggtatgtgggggtgtgaagggacgcatgtgggggtccgtggacgtgcaaggggacactaccagctttgtgctttgaaaagatggctctgggccagatgaggtgtctcatgcctgtaatcccagcactttgggaggccaaggcaggtcaaatgtttgagcccaggagttcaagaccagcctgggcaacatagtaaaaccctgtgtctaacaaaatacaaaaattagccaggcatgatgatgcacacctgtagtcccagctattcaggaggctgaggtgggaggatcaactgaacccaggttgaggttgcagtaagccatgatcataacactgtactccagcctgggcaacagagtgagaccctgtaaaaaaaaaaaaaaaaagactcttcttctgactgaggggatgaatgaatgaagtcaaatggttacatggcatagaagctgcgaaaggaaacctgggcgcagcacacaacgaatgatagcaaactggggagcaggctgtgagtgcttcgaagagtaaagggcctagactgaggagatgacgggtggatgcccaggaaggcaggaggaaacgagatgtcctgagcccagggagaaggtatgttaaccacgtggtatgctcctgagacatcatcagatgaagccagaaaaccatccagtgcacttaactacatgaaggtctctggtccagtggtgcgatggggagggaagccaagctggagaggtatgaggagacatggagagggagaaggcctggagaggtgtatcacttgacaaagctgttaaggagaagaaggaggaagtactagcaagaggggactgtgggatcaaagaagggtctgcagagaatctaggaaaggggaacagcgtccacgagcatgaatttggcagctctgaccaacggtacaagggccttgcccaaagtgtgtttggtcttcttggcagaggtctcgctagagtgcagagggatgcaccaggtgatgaaagcttcaggctttagacactaatcatcactagcactgatggaagccactgcactttacattgtcacttcatttatgagacagacactctagattgaggagaaaatgaggtaagtaagttagccatgcctagaaacgacagagtcaaggaccaaaccaccaaaagccagggttcctcatgtgttgtccaaggatcacccacaacagactcctctgtgtacttgtgaaaagtacagacccttcgagaccagtctgaccaacacagagaaaccctgtctctactaaaaatacaaaattagccaggtgtggtggtgcatgcctgtaatcccagctactcaggaggctgaggcaggagaatggcttgaacccaggaggcggaggttgcagtgagccaagatcgcgccactgcactccagcctgggcaacaagagtgaaactatgtttcaaaaaaaaaaaaaaaaaaaaagtacagacctctgggcccagccctgagccactaaattacagtttggggtctggggtttttcagaagtatgcaggggcttttaatgcccaccacaaaccaggcatcactgcaggagctgcaatccctcccaaccaccacctgtgtgccaggtgcacgttcccaagtatgtgggtggccacggcctctcatctccaaatccaccttcatggccagctcatgttactgcagcatttccacccagccagttggtaccatggaaggcttcctctgtagagggtgctggagagacgctggaggagctggggctttgctttctgattccagcttcctctggctcttccttccatgcattaatttctttttttaatttctggttttagagtccaagggtctcactatattacccaggctggattcgaactcccaggctcaagtaatcttcccgccttggcctcccaaggagctgggattacaaatgggatttcatgcgcagatcctttctttaattttttgggtggccagcaacatgcagtacctccccatggtggcttctcctggccccctatcccagtgagtttcattagggcagcccctcagcaaacttcttggccacccggcaggccacagctacatcctctccaggaaggtgtggatcttgggttctggctgaggctcctccagagctgcttcctcctgaagcatcagccctaggagcagtggctgctcccctgagctgctactcctgaattcttcagtattctctttactccttagtaggcaatcctgttgttattattattattatttttagagacagggtctcactctgtcacctaggctggagtgcaatggcactatcacatctcactgcagccctgacctccttcctgggctcaagtgatcctcccatctcagcctcctgcatagctgggactacaggtgtgagccaccatgcgcagctcccaaacctgttattattaatcattctttatagtaaattttccctcttcaagtcattgtgtgtgttctgactcctgattggaccttgactgatatatgctacatcaggccacacaatgcagatgttacacaaggcaggagagaaccaaatctggggacatagaaagacatttggcatgtgttgtgagatgaaagaaaggtaacaaaacagcatgcactttatatacatatactctctaaattgttaaaaatcttatctgtgggagcacaattaagtgtgtttagctttatgatatggtctggctgtgtccccactcacatctcatcttgaattgtagctcccataattccctcatattgtcggagggacccagtgggagataattgaatcatggggcggtttcccccatactgttctcgtggtagtgaataagtctcatgaaatctgatggttttataaggggaaacccctttctcttggttctcattctctcttgtctgcttccatgtaagatgtgcctttcaccttctgccatgactgtgaggcctccccagccacggggaactatgagtccattaaacttctttttcttgataagttacccagtcttgggtatgtctttatcagcagcgtgaaaacggactaatgcactttatatatttatgtattttttttacagtgagacagtattacttttgtaatttaaaaagagatgcaccttttacataaatctaatatttaaaaaatacgccaactgaccaacaggtgttttctggccccaggattatgaggctggcattctgtgttccctgagaaatgatttacagaaacgtttccctgagcccgagcaactctagggctgctgataaagtagttattggttgtccacttgatgcctggctctccttgtcacttctcaaatgtgagccacctcttaggaaactgaaaacttttccctacctttgttataacatgctgaattctctcattgggataatcaaatagatatatgtccacgtactcattcacccaacagatctttcctagtgggccactgtgggccaggtctttccccaagcactgggactagggagaccctatcctatccctacctctattgcttaaacccaggagttcaagaccagcctagttaacatggcaaaaaaaaacagcaccttgtactttaaaaacaacctaatatccagaagcaattgactgcagaataacttttcctttttttttgagatggggtttcactctgtcactcaggctggggtacaatggtgcgatctcagctcactgcagcctctgcctccagggctcaagcaatcctcccacctcagcctcctgactagctaggaccacaggtacatgccaccatacctggctacttttttgtattctggtagagatgggatgtccattttttgtagagagagtctatgttgcccaagctggtctcaaactcctaagctcaagagatctacccaccttggcctcccaaagtactgggattacaggagcgagccaccacacccagccttattttcttgagacagggtctcattctgtcacccaggctggaatgcaatggtgcaatcatggcttgctgcagccctgaccttccgagctcaagtgatcctcccacctcgcccttctgagtagctgggactgtaggcgtgcaccaccttgcctggctgatgtttttatttttactttttgtacagacgatgtctccctgtgttgcccaggctgctttcaaattcttgagctcaagggatcctccagccttggccttccaaagtgctaggattacaggcgtgagccaccacacctggaccctcattttcaataaaaaataaatttcaattatattcctagttaaaatcacagagctacagcatgaaggggcaatgggtatgttttcctaaaaataagcaatattcattatgaaaaaatgttcttatattttataaaaattgtggttttttttttctacctttttgttgtgtccgctgtggtgcaggaggggagcctggaaacccatcttgatgagaaatattttcatcgtcttcactgttcacctcatgtaacaatggcacctttttgttataaaagacaaaggagcaaaaaagtgagaaaggtaacctttatatacagcatgtcctcctaacaaattccaacatctttcaaaccttccccactgggagcttcctccatgggcacttcagctgctttcctcagtgacacacaaaaggcgtatatcaggtggggctggatgacacttccaggccctcaggaaaagcttagggggcaaaggcaacaccattaaagttatgctaaggccactgagagctccacatcccagccatgttgccagggcagcttcccttcctcatccctgccagggaccacccaatgccactccaccctggtactgacaccatgttactagtttccccccaccccttttttttgagacagggtctcctctgtcacccaagctggagcacagtggtgtgatcacagctcactgcagccttgacttcccacgtgcaagcgatcctctcacttcagcctctggagtagctgggaccacaggcgtgcaccaccacaaccaggtaattttttttttattttttgtagagacaaggtctccttatgttgcccaggttcgtctcaaactccagggcccatgcgatcctcctgcttcagcctcccaaaatgcagggattacagatgacagccactgcacccagcctgtgttaatcatttctatgtgggacaagcagtgctgacctcccctgggaggactctcattgaagcctcctatgttcaccaattatgtaagtccactgtaaatttcatttactgagggactcccctctactgactgagagtagctcctatataggtaaccattcatgttagctatataggagctgctgaaattttgtttcatcccaacatggcagggacacagagttgtcctttagagaggcccatgggccaggaatgggacctgccgctgatgaggaggagatatttccattggcaggagcctgggggtagggacagaggctgcctaagaggaagagaaagaacagtgaagcaggtctttttttttttctttttttaagacatggtctcactctgtcaccctggctggagtgcagtggcgcaatcatggcttgcagcagcctttacctcctgggctcaagcaatcctccacctcagcctcccagtagctaggactacaagcgtatgacaccaagcccagctaatttttaaattttttgtagagatggggtctcagtatgttgtccaggctggtcttgaacttctggcctcaagtgatcctcctgccttggcctcccaaagggctgtgattacaggcatgagccactgcactcgacctgaaccagttgttacatggtaaactgtgactggcgctgtctgggtgggctgccctttggctctcctgattcttcagtaaaatcttgcttttgtgatcagtttggcttagctgggctgcactgcaggcaatggaagggctgtccctggggctgacaaggaggtggtggcagggactagcaagacgcccatgagaaggggcatttcagagtaagagctaaggctgctacgtccacctgtctctgtggacatggttccaagatgacctggctcaagagaagcaaacaggtctcccaagatactcatcatttgaagaaagaaaaagtaaatggccccgtacttttttttttttttaatacagacaggatctcactatggtgtccaggccagtcttgaactcttgtcctcaaatgatcctcccacctccacctcccaaagtggtgggattataggtgtgagccaccacgcaaggccgacctcaagcttttttatctcccaggaacaaacttccttgttcaacctgtcaaaaatatattaagtgactcactattctcaaggaaatgtgaaataggtaagatgacttaaaaagcattaggggccaggtatggtggctcacatctataatcccagcactttgggaggctaaggcaggcggatcacctgaagtcgggagttcaagaccagcctgatcaacatggagaaaccttgtctctactaaaaatataaaattagccaggtgtggtggcacatgcctgtaatcccagctactcaggaggctgaggcaggagaattgcttgaacccaggaggcggaggttgcagtgagcagaaatcgtgccattgcactccagcctgtgcaataagagtgaaactctgcccccttcacccccacaaaaaaagcattaagaagatgctcaatatggacaatcgtttggcagtatctactggtactaaagctgatggtacatataccctatgaccatacacataccattcctcagtatatacccaccagaaatacacaaatatgtacatcaagggacacatcgccaaatgttcacagcagcactattcctaagagtcccaaactggaaccaattaagtctctgtcatcagtaaaatgaataactgagtggcacggttgtacagtaaaatatacagcaatgagaacaaacccgcccctgctatacacaataactgaagactcccaaactccaaataatgcatatcgtctaattaaatgcatgtaaattttcagaacaggcaaagctaatctcaggttatttttaaagattaaagctaatcttggcaatggttaactctgtgggaagtagtgactaagaagaagggtgatttctagggtacaagtaatttttttttaatctgagtggtggctactttttgaaaatgtatcgaaatgtgcacttatgatttactcacttcttgtgcatattttatatatcaataaataagtctactaaaaacataccttcataaagaatttgtgatactttatataaacatactttaaaaggcttggctgggcgcaatggctcacgccagtaatcccaacactttgggaggatcacctgaggtcaggagttcgagaccatcctggccaacatgatgaaacccaatctctactaaaaatacaaaaatttgctgggcatggtggcgggcacctgtagtcccagctacttgggaggctgaggcaggagaatcacttgaacccaggaggcggaggttgcagtgaaccaagattgcaccactacattccagcctgggcgacagagcaagactctgtctcaaaagaaataaacaacaacaaaaaattatatatatatatatatatatatacacacacacacacacacacacacacacacacgcacactactacagttgtttacttaaacttgtagtaaaagaataaaaacacaaacttccaggatgcactccaaatccaagaaaagatgagtttccaaggagggagtggggttaggggacaaggcaacatctaccctaatggtaacattttattatttattattttctacttttcacatgttaaaatttaaaaattttcctactacacatggctcctaaagccaccctaacagacttgcctaaaaaaacaaaatatctgtccttctagcaaggaaagagtctctgtaggtcactgtatctctttcttccaagggaaatattgtagtaagctttccctctagaacagtggagagatatgactctatgtgtaacatcggtacaaaataaccagccggcaagtgtgcgggtgaggagcagtgggactgattctgagccctgcagagctcgacaggagcacagttgtccatattgagctctgggcagtgtctgcctattccagagctgcttgctatgagaagcctaattctatgtgtgaaagtctgtatatgtgggaaaatgatggtgagttcatgaaacagccacataaggatccctcaaaataagctcctgaagaccatttaaaatgtattttagggccaggggcgttggcttatgcctgtaatcccaacactttgggagcccgaagcaagaggattgcttaagcccaggagttcaaggccagtctggctaacataacaagaccctggccctatagaaaaaaaaaaaaaaagccagttgtggtgccgcgtgcctaaagccccagctactcgggaggctgaggtgggaggatcacttgagcccaggaggaggtggctataatgagctaggatcgtgccactgcactccagcctggggacagtgagaccccatctcaatttaaaaaaaaaaaagtgttttaatatagtaggggctaattaatatacatataatcaataccggtgtagcttaatgctgctggtctatatgtacagacactatgaataacacattataatgatggtgaaaaaaagaaaaaggggctaggcacagtggctcacacctgtaatccaggtactttgaaaggctgaggcaggcggatcgcttgaggtcaggagttcaagaccagcctaggcaacatggagaaaccctgtctctacaaaaagcacaaaaaatagccaggcatggtggtgtgtgtctgtagtcccagctacttgggaggctgaggtgggaggatcacttgagtccaggaggttgaggctacagtgagctataatggtgccactgcactccagcctggaggacagagcaagactctgtctcaaaaaaaaaaaaaaaaaaaaagaaaagaaaaagaaaagaaatgaaaagaaagaaaaaaataaaggaaaaagggatatggtgctatattttgccattaaagaaatgtcattatctagtttccaaaaccctgggagcagtttaaaaatcgggattcgcagagcagctggcagtggagaagtatgtttccttgaatctctctgtgtgcagtgccctgatgtgtgacagggcaatgaagggaattcctcagcgagtcagtgggggtcagctaagataaatgcacacaggagttagaaacgggagcgctcacagtaaacactcaaagcacgtcagctcccattgagacacgcatgacgatcttccccgtcaggcatgaatttaaagaaaggctgcagtgtgcaaaatgataccataaaagtgataggaaatttagcttccaaggtcaaagaaaagaacgagattgctaagctgtgaatggaactccacattaacaatatgaagatgttaatctttgtttttgcaagataaaggaaagaagtttatgttttaatctaaccagatagaaatgaggctggacacgtttaaaaaaataagccccaaagcaaatgctatcaaatgcagaatagagagaagaaatccttagcaatgcactaatttaccaaaagttaacatcagggtgaatgtcaagaagaaaactgggaacatagaaaacacctgatttctgtgtggcacagcgtacaggtcatcactgtggcctcctctgtcctcccgggcactgacatcccccaattccttgccgctggatgacagctgagtttcaatgtcctcttcgtccccatagtccagtgtttcaaaggatggcaaagaagatcttcttcccatctcactctgccaatttggcctgtattagaatattcatggggaaaacaaacaaaaagtcacttaacacttgacactgataaatatctttttttttttttttttttgaggtagagtcttgctctgtcgcccaggctggagtgcagtggcacaatctcggctcactgcaagctccgcctcgtgggttcacgccattctcctgcctcagcctagtgagtagctgggactacaggtgcccaccaccgcgcctggctaatttttttttttgtatttttagtacagatggggtttcaccctgttagccacggtggtctcgatctcctgacctcgtgatccgcccgcctcggcctcccaaagtgctgggattacaggcgtgagccactgtgcccggccagtatcatgtattaaatgcactgcctccaagtccttaccataaatgtgggatactacaaagtacacagaagctaaaagattaaattttccaccgtcccatctctttgtacacttggcatatccttctagtttctgtttttagagttactgcatacatatacaatttgtcttgttatgaataagggttttttgtttttttgttttttttttgagacagggtctcactctgtctcccaggctggagtgaagtggtgcaatcatggttcactgtagcctcaatctctctgggctcaggtgatcctccagtctcagcctcccaatagctgggactaaccaagcccagctagtttttgtattttttgtagagacggggtttcaccatgttgtccaggctggtcttgaactccttggctcaagggatccgcctgcctcagcctcctaaagtgctaggattacaggcatgagccactgagcccagcctgttgttattattattgttattattattttgagacagagtctcactctgtcacccaggatggagtatagtagtgcaatcttggcttactgcaacctctgcctcccgggttcaagtgattctcctgcctcagcctcctgagtagctgggattacaggcactcgccaccacacctggctaatttttctatttttagtagagatggggtttcaccatgttggccaggatggtctcaaactcctgacctcaaatgatctgcacacctcggcctcccaaagtgctgggattacaggcctgagccaccatgcctggccccagcctgctattaataagtatttttattttttaaattgagacagggtctcattctgccacacaggctggaatgcagaggtgcaatcttggcttactgcagcatccacctccccagctcaagtgatcctcctacctcagcctcccgagtagctgggactagagatgcactccaccatacccagctaattttttgtttgtttgtttatttgtatttttagtagagaaggggtttcaccatgttgcccaggctggtctcaaactccagagctgaagagatccacccacctcaacctcccaaagtgttgggattacaggtatgatccactgtccccagcctattaatgagtttttatagtcaacattttaaaaggtaggaatccactagatataccagcttaaccagccattttccttgcttaggtggggtttttttccttcactttccattgttgtagataaccctgtaataaacatctgtgtgcagataacccctactgtatttaaggttactcacataaaacaaaccgccatagagtaaattctttttttctttatcttttttatttgagatggagtctcgctctgtcacccaggctggagtgtggtggcgcgatctcagtgcactgccacctccgcttcccgcgttcaagtgattctcctgcctcagcctcccgagtagctgggactacaggcgcctgccaccatgcctggctaatttttgtatttttagtagacatggggtttcaccacattggccaggctggtcttgaactcctgacctcaagtgatacgcccgcctcagcctcaaaaagtgctgaggttacaggcgtgagccactgtgtccggcccatacagtaaattcttgagtcaaatggtgtgaacattttgtgtctacatacatactgcacaaaatcatttctccaagctataaatacactggtaataattttctaaaacttgccaaaacaacttaaaacccactgtctaaatttgcatttgttactgagactgaatgtttttccatatacttgtgttcaggtcctttgtctgttttacttctggtatgtccattccaatttggttcttttttttttttttttttttttttgagatggagtctcgctctgtcccccaggctggagtgcagtggctccatcttggctcactgcaagctccacctcccgggttcacgccattctcctgcctcagcctcctgagtagctgggactacaggcgcccgccaccacgccagctaattttttgtatttttagtaaagacagggtttcaccatgttggccaggatggtctcgatctgctgacctcgtgatccgtccatctcggcctcccaaaatgctgggattacaggcgtgagccaccgcacccggcctgttttttctttttttatttttgtttttttttttgagacagggtctcactctgtcatccagggtggagtgaagtgacaagatcatactgcaactttgacctcctgggctcaagtgatcctcctgcctcagcctcccaagcagctgggactacaggtgagcaacaccatgccaggatgatttttgtatttttttgtagagatgggggtctcactttgttgcccaggctggtctcaaactcctgatctcaagcagtcctcccacctcagcctctcaaagtgctgggattacaggtgtgaaccaccacacttgacttccattccaatttgaaattactaaaattaatctactaaaattaaagtcctgactttgcttttactataaatgttttttctgttctattaatattattttgcttatataaatttcttaaacataaaagcgattaaaaaggtttttttactttctaaattcttggtgtaaaagcaaatagcagtcatatccctgaagaggtgtgataagactggatattggatttcacagtcttatttgtgtgtctatagagtatagtccttcattcattaggaatttattttagtgtatgacttaggcgaggctcaaagctgatttctaatactgctaatcaatatagcactgaatgctttccttcccctttgagctgtgggacaggctttattaaagattcagtatgcttgtagaaacactacgttcacctcagggcattcctgggcacctctgtatcactcaactagtcctacactgttcttgctactttatctatatgttttaaaatatgacagggctgggcacaatggctttttattgcatcaattgaggggtagctgttgggatgttcgtggttaaaatataatttctgggctctgactgggttgctttttagtctcttgtttttagggtttggcaaaggtaggtttacctaggttgatggaaaagtcagagatggggtggttgtggatttaatcggaaatagttcttgaaattgagtgtatgtgcgtgcatgagcatggctcacacctataatcccgcactttgggaggccaaggagagaggatctcttgaagctagaagttcaagtccagcctgggtaatatcaggaaaccctgtctctacaaaataaaaataaaaattagcctgggctgggcacagtggttcatgcctgtcatcccagcactttgggaggtcaaggtgggcagatggcttgaggccaggagtttgagaccagcctggccaacatggtgaaaccctgtctctactaaaaatacaaaaattagccaggtgtagtggcgcacaactgtagtcccagctactctggaggctgaggcaggagaattgctagaactgaagaggcaaaggttgcagtgagccgagatcatgccactgcactccaccctgagtgacagagcaagactctggctcaaaaataaataaataaatataaaaacaaataaataaattagccaagcacggtagcaagcatctgtggtaccagcttcttgggaggctaaggcaggagaatcacttgaccccaggaagaggaggttgcagtgagccatgattgtgccattgcactccagcctgtgcaacagaatgagatcctgtgtcaaaacaaaacaaaaaaatcccccccccgccaaaaaataaaatacaatggggatagtccagcactcctgtgggtcagaccatctcctctgatggtcttacgtgcttattttttccactgaattttagaacgatttactcgtttttagtttttactcagccaaagtataatgcttaccaggaaaaaaaaaaaggttaaattcaaatatctcaaaatggtagcaatatttttggccaaaacaaaaataaaaacaagccctagaaggaaatacattaagtatttatataatactaatagtaggaagggtcttactaaatttacaattattacagaaaatgtaaagaaaaaatggatagattttactaaatataaaatacagaatatttagtatatcaaaaaagcctacacaggccaggcatagtggctcacacttgtaatcccagcactttgggaggccaaggtgggcggatcaccagaggtcaggattacagaccggccaacatggcaaaatctcatctctactaaaaatacaaaaattagccgggagaggtggcacacgcctgtaatcccagctactcaggagactgaggcaggagaatcgcttgaatccaggaggcagaggttgcagtgagccaggattgcaccactgccctccagcctgggcaacagagtgagactctgtctcaaaaaagtcaacccaacacaaaggtgaatatacgtgacaattaaaaaggcaaatgtggccaggcatggtggctcacgtttgtaatcccagcactttgggaggccgaggcgggtggatcacctgaggtcgggagttcaagaccagcctgaccaacatggagaaaccccgtctctactaaaaatacaaaaattagccaggtgtggtggcgtgtgcctgtagtctcagctactcaggaggctgaggcaggagaatggcttgaacccaggaggcggtggttgcagtgagccaagattgtgccattgtgctctagtctgggcaacaagagtgaaattctgtctcaaaacaaaacaaaacaaaacaaacaaaacaaaaaaaaaaaaaacagacaaatgtgatcgtggatccctactcccatccctgccccatgcacccttagagacctccagtgtcttcccaccactccaaaggcagacaccaaccctctaaacaggacaccaaaggcacccccagcctggtccctgcccactcctccagccccatctcgcatcccaaacatcctctttccactgccacctgtgtcacactccctcgtttctgtctggaaagctcatcccagccccacaaagatcatgcctagcccttgagctgttcctagatgattcctgtacatcctaagctctccccttgaccctttcttcctcaggaggaaaccttcctgaccccctagccctgtgtcagctcaaacccaggacaagcaacaaaggaaaagatgatgaagaaaaaaggctaaactgcagctgccaagaagatcaaattaatgtgaatgtccagagatacacgtgagaggtaaggagggaccactctcactgttcaggttgctgcacaaagaaacttactaagggctggaagcagcgctgaattcattagctctgtgccgctgtgaaaatggccaggacccatacaagtcaaaatctaacaagatccactatggaggaaatccagatcgcagagcaattaggttgctggacagtgtccatttgacattggtgatgaaaacccagtgactaagactctagtcataaatacatgcatgagcacccacgcacccacacaggtacacatgcacacacatgtacgcatgcacacatacacgtagagaccaggctgagcctgcccctcttccactctcagaggaagcagaggcggcgatctggtacctaccgaggcctcagctgtgaggtggtggcatagggctcgatgaagctgtcctgttcaacactgctcacatcactctcagaccgggacctctggcgaggctgaggaatagcaaccgtccgcccagtcaatgttgtcgccagaatggctgctgccagagcagatctgcggacaaaaacatcccatggagacagtgagacatgaacattccaggtgaatgctgaacaaggtacataaactcatcaaggcttaccttctgctggacagtgtcgactgagcatttactctgcacccatcatctaccgcaggccatcagacaatctcatttgattctcacacaactgtatgactacatattattgtcatcccattttccatagaaattaaatgacttgtaaagattacctagccaataggaggtagaacagggcctctaatccaggcagacacaaaagcctacattcaagtagttttcttattagaatggaagatcagaatggaaaaagaaaatgagatatagaaagactaaaagatttaaaaggggactttaaaaatacttgtgaattactcaggaatattttacaggaaagttagagtaaacagatttaccctcctgcctaaaaaagtaaaacaaggccaggcgcggtggctcatgcttataatcccagcactttgggaggccgaggtgggtggatcacgaggtcaggagatcgagaccagcctggctaacacggtgaaacctcatctctactaaaaatacaaaaaaattagccaggtgtggtggcgcgcacctgtaatcccagctactcaggagactgaggcaggagaatcggttgaacccgggaggtggaggttactatgagcctacattgcactactgcactccaacctgggcaacagagcaagtctccatctcaaaaaaaaaaatagtaaaacaaaacaaaagaccaccgtcccagcttgctgcctaggaaaatttccaggtcacagcacagggaggaggaatgggtggagccaggcagactccctgagttgcagagatggagctgagagaatgtgtaggatagagtgccggaaaggagagaactgcacagagagaacgaggagatctgcagaaggtcccctagtttcagcgggatacagtgcagcacacaagtgtgaggaaattaccagacagtggaggaagaaccattcaccaggatcagaggagcagtgccaggtgcttacatacagcccaagacggcagctgctcccaccaggaagactggagaaacctatcattcacaagatgccgggtgcagcactcagaaaggtctggcctgggtactggggaataattagccctggctgggcactgctccacaccccacctaacaaatcatataagaaagacccggccaggcacagtggctcacatctgtaatcccagcactttgggaggctgaggagggcggatcatgaggtcaagagatggagaccatcctggccaacatggtgaaaccctgtctctaccaaaaatacaaaaaaaaaaaaaaattaggtgggcgtggtggcgggtatctgtagtcccagctacttgggaggctgaggcaggagaatggcgtgaacctgggaggtggagcttgcagtgagccgagatcgcgccactgccctccagcctgggcgacagagcgagactccatctcaaaaaaaaaaaaaaaaaaaagagcatcaatcagatgtgggataaaaaccaccatttttcatattttggttttggggcttttttttgagacgatctcactctgttgcccaggctggagtacagtggcgcaatcacagctcagtatagcctcaacctcctgggctcaagtgatcctcccacctcagtatcttgaatagctgggactataggcacacgccaccacacctggctaatttttatattttttgtagagatggggtctcaatatgttctccaggctggtctggaactcctgggctcaagtaatcctcctgcctcagtctcccaaaatgttgggattacagccatgagccaccacgcccagctgctgttttgttttaaattactacattttggtgcaattgtcacacagcaataaataactaatagccttaccatcaaatggtgctggaaaaatcaaatttccatatgcaaaaaaaaaaaaaaatcatggatctataccttacacactgatatggtttggctctgtgccattacccaaatctcctctcaaattgtaatccccatgtgtcgaaggaggaaagtgattggattatgggggtggtttcccccatcctgttcttgtgatagtgagctctcacaagagcagatggttttacaaatggtagtttcttctgagctctcacatgctcgctctctctcatctgccgccatgtaagacatgcctgcttccccttctgccatgattgttggtttcctgaggattccccagccatgcagaactgtgagtcaattaaatctcctttgcttataaattaccacatctgaggtagtatctttacagcagtgtgagaacggactaatacacgcaccatctacaaacactaactctaaatggattacagacctaactgtaaagccgaaaaccataacacttctagaagaaaatataagagaaaacctttgtgaccttaggttaggtaaatatttcttcaatatgagatactgaaagcatgatccataaaagaaaaaattgtaagctggacttcataaaaattaataacttctgctctttgaaaggcactgtttaagagaatgaaaagacaagccatagatagagagaaaagacttgcaaatcacatatttgataaaagacttgtattgatactatataatgaaccctcaggatgcaataatggaaaacaagccagggctgtgatgtctccaggaaacccacagtcttcacccaggtctctgcttacgtctcctggatgaaaaatgtcattgcctccaactgaacatgatcctgagtccaacggccttcccaagatggttcttagatctgcaacaggacttgtgaccaacaaggaatgcccaatttttataaatgggcaaaagatgtgaacagatgctttactaaaaaagatataaagatgacaaataagcacatgaaaaaaatgctcaataccattagccattagagaaatgcaaaataagaccaggcgcggtagctcacgcctgtaatcccagcactttgggaggccgaggcgggtggatcacttaaggtcaggagtttgagatcagcctggccaacatggcaaaaccacatctctactaaaaatacaaaaattagccgggtgtggtggtgcatgcctgtaatcccagctacttaggaggctgaagcatgagaatcgcttgaatccaggaggcggaggttgaagtgagctgaaatcgttccactgcactccagcctgggtgacagaatgagactctgatcaaaaataacagactccatctcaaaaacaaaaaaacaaaaataaccacaatgaaatactagtacacgctcatgaaatgtccaaaattttaaaaactgaccaagacaaccccttgtgctcttttattctaaactgggcctatgagaatggattccacaaaggagggcaataagaagggttgttctgtcgtcaacaaggttgtgaccagaaagcacactatcagcactcatgagcacacctatggagtgtgctttaagacactgcccctggcatacacaaagagatctggaaattttccatgaaagagctaggaactcgagatgtgtgcattgatgccgggctcaacaaagctgtctcagacaaaggagtaaggaatatccctcaccctatctgtgtaccactgtccagaaagcgtaatgaagatgaagattgatcaaacaagctctgtacattggttagctatgcaactgtcaccactttcaaaaacctacagtcaatgtggatgaaaactaaccactgactgtccaagttataaaagaccacacacacacacacacacacacacacgcactcacacgcatgcacatgaacacacacacacacacacacacacacacacacacacacactctgaccaaaccaagtgttggtgagaatatgaagcaactggactcatatactgttggtgggaacataaatgggacaatgaccttggaaaatagtttgacagttccttaataaattaaatacctgcctagtataaggcccagttatagatatttacccgagaaatgaaagtatgtatccaaacatttgtgtatacatttttttttttttgagatataagtctcgctttgttgcccaggctagagtacagtggtgcgatctgggctcactgcaacctctgcctccaggttcaggcgattctcgtgcctcagcctccccagtagctgggactacaggagtgcaccaccacacccagctaatttttgtatttttagtggagataggttttcaccgtgttgaccaggctggtctcaaactactaagctcaggtgatctgcctgccttagcctcccaaattgctgggattataggcatgagccaccacactcagccagtgtgtaaatgtttacagcagcctttttctagtaaccaaaaattagaaacaaactaaatatccatcaacaggagaatggataaacaaactgtggcatattcatataatgaaatactactcagtaaggaaaaggatgaattattgactttcggaacacgcgttaatcagaataatcatgctgagtgaaggaaggcagtgtattttatgtaactccacttatataaaattctagaaaatacaagctaatccatagtgtgagaaaggagatgagaggttgcctggggatgaacaggagcatgaaaggtggcagagaggggcagggggaaggaattacaaaggagcatgaggacccttgtcagaatgatagatatatttattatctttttttctttttcaggagctaccctattaattatctttttaaaataaacttttttagaggcagggcctcactcacaacagcctcactgttgctcaggctgcagtgcagtgacatgatcatagctcaccgcagccttttcctcttgggctcaagtgatcttccagccttagcctcccgagtatctgggattgcagacatgcaccatcatgctcagataatttattttcttttgatttttgctatagataaggatttgctatgttgcccaggctgatcttaaactcctgggcacaagcaattctcctgcctcagcctcccaggatcagtttaccctaggagttcaagaccaacttgggcaacatagtgagacctccatctctgcagaaaatttaaaaaattagccaggcatggtggtgtgtacctgtagtcccagctactcaggacgctgagacaggaggatcgcttgatgctagggggttgaggctgcagtgagtcacgttcgcaccaatgcactccagcctgggcaacagaatgagaccatatctcgaaaaaactttttgttttggccaggcacagtggctcacgtctgtaatcccaggcactttgggaggcagaggcaggtggattgcttgagcccaggatttcagcctgggaaacatggcaaaaccctatctctataaaaaatagaaaaattagttgggcatggtggtacatgcctgtagtcccagctacccggcgggctgagatgggagaactgattgagcctgggaggtggaggctgcagtgagccatgattgcaccactgcactccagcctgggcaacagagcaagatcttgccttgaaaaaaaaattaataattaaaaaaaaaaaagaaaatgggctgggtgcggaggttgatgcctgtaatcccagcactttcagaggccaaggcaggcggattaagaaagaggtcaggagtttgagaccagtctggccaacatggtgaagccccatctctactaaaaatacaaaaattagctaggcgtggtggcatgtgcctgtaatcccagctactccggaggctgaggcaggagaattgcttgaacctgggaggtggaggctgcagtgagccaagattgcgccactgcactccagcctgggcaacagaacaagactccgtttcgaaggaaaaaaaaaagaaagaaaattatgtgtataattcaaaattccctgttaacctgaatacttgggctttaatgctttacatttttttttaaatactcattgcattcaatcatgaaatgtgagaagttcatgcacctgaaaaggagagacctcaagtcagtccattatcctcagagacaccatattaattgcatcattatggaatcgtggtaaacattttgaaggacatgattctaaccaccctacttatacttttctgggcagtttgagcagttccaggatccagtacttggaggctgagcacaggggtgacctcagtgcctgctcatctgatactcaccttggtctctctggagatgggttggggctgcggggaggaggtgtgcgtggcacagctgccttcggagcaacgctggctgcaggtaaaaggccatggatgatgtgtttctgcacaaatgaaatccaacagaagtcactgggttgggtcactggatcacctgagtcttgtcaccactctccctgggcctgcaaggggacacctgcactggccacccatggatccaaacccatcagaagcccactcctcccctgccatccccagtccccatcaggccagacaagtgcacacagccaaggagcatcatgatagctgctcattgtgtggccctcttgtccttccctcctcagagcttccctggctgtccccaagagtcaccctctagctcttccatgtgtcccacagcactccccccagtgatgtctcatgtggctccccctgcagagcagggcgacttcctgagaagcaagtgatatccttattgtttttcgctttgttttgtttttgagatggggtcttgctctgttgcccagagtggagtgcagtggtacgatcatagctcaccgcagcctcaaactcccgcttcagccacacgagtagacgggactacagatgttcaccaccatgcctaggtaatttttgtatttttttgtagagacaggatctcactacattgcccagactggtctcgaacttctagcttcaagtgatcctcccacctcagcttcccaaagtgttgggattataggtgcgagtgctgcacctggcccactctcttatctttatcaatcctggaactctagcattgagcacattgcctcacacctcataggggcttaatataagcttttaggtggcttatctccaagacgagagtaatgaaaactagctcctatacacaatgaaagtcagagagctccgctttaggtaactgtaactgggagtctctgagacgtttctgggtctagtccaatcattttcttggcacgagccattcattcacacctactagaggcaaaacaccatgacagcaatgaagaaaccttgtcttcatccccaaagtggtgagaagggaggaaaaacacccaaataattattacagaacatagaattatggaatgagccgggagaaaggctctcactaaaaatgaaaaaaaaaaaaaagagcatcaatgagatgtgggataaaaacactattgttttctatttgaagccagtaattagcacaaagtgctggggtgggcagggagggaagattcctccaggtctggggccagcctgggaatttcaaatgctttccttcgagaaaatcacacaggcgtttagactgggctttcagagatgcccactggtcccacatttggaaatgtgacggaacagcattctaggaagagggaacggcatgaacaaaggaatggagcaagacattggttgcagtgctcggaaatcataagcacgattctccgttttgctagactagaggcatcttcgagggtggggcttgggggcatggtggggacaattcccatgggaagggcttccagagcagatggaggaaatcccaaggcctagtgaggagcacccactgacagtggccccaggaatgttaggtagtggtcagcacgagacacaaggctgggaagggtggcacagagtgggggcatctttcaggagtgagggatgggcacaccttccagtcatctcctacagcccccaccaccgacttgcacagccacccacaggagcagaagctccaagcagtctctacccaatacccccactctgtttacctctgtgtggcacctgccaccctgtatttgtcaagtgattccacagtttccatgtttccaccctgcccccctccaccacctgctacacgacaagaaatggtttttgtttgtttgcttgttttggagacagtcttgtctgtcacccaggctggagtgcggtggcacgatcttggctcactgcaacctccacctcctgggttcaagctattctcatgcctcagcctcccaagtagctaggaccacagtcatgtgccaacatgcctagctaatttttgtattttggtagagatggggttttaccatgttggccagggtggtctcaaactcctgacctcaggcaatccgcctgccttggcctcccaaaatactgggattacatgtgtgaaccactgcacctggccagaaaaggttttcttaacctttgaatcccaagggctggcgtccagcaggtcctccaaaaaggctgcataagattttttttttttaaagagtgaatcccccctcataccatcacaatcattcctaactatggtcccctcatcaatcctgtctctactgggcataaaaaccctcatgggcagcaccactctctcaacggcaggcaaatgtccagcatggcttatcaggctgatataggttggttcctaccaagtgttatgggatttttggggtgtcgatttttctggccggaacctctgtggccacagtgcctttgcctgagttcttgtcctgcatccaggaagaatgaggtacacagacaagtgaagggtgaagaggagttttatttagtgttagaagagctcagaggagtgggtagctcctctctggagacagattgtcccatgagctcaaccattcagctctcaacagagaggaggccctggagagagtggctcctctccgcaggcaagtcattccaatgtctctgcaggtctctgaagctcgcagcagagtgtagctcctctctgctggcaggtggtctctgtagctttcagcggagaaggtactcctctctgtagctggtcaccccaccgtctccagctatcagcagagagggtactgctctctgcagctggtcatcctgtcccctcgtctctaccatcttcatcctctggctattctctgcgctgctctggctgagcccagggtttttatggacctcagcggggaagaagtgtgtgctgattgggccattggcaggcccagaaaaggctccacgagtttccactctggtcagagggactggcagcccagcccccagaattcaggccctccctggcctgagggtggggccttactggggaccccacccccttcctcctgctgccattcatggctgcaggtcttggctccgactcccctccaagatcagagcagttgctggagtggagagaggccaggcagtggaagcagacacccctgagcctgcagggatggagggtgaagggggctgtccttcctgggatggccgatggtgcaggctacagagatgccctcgtcctgtgcctgggggggcagccacagctgcacctgggagctcccaccccgccaacttggaagaggcagggctcccacttgtccctggctcctgcctgcgcggctgcagctgcatctggaagggcaaattctgcctgttcccggctcccccaggagcagagaggctcggatccacagctgcagtttgggtggctgtagccctgcccaagagggtggggctcctgcctgctccatagagcagaaggcctgggtctgcagcagcggtttgcggctccagtcccaactcatgagggacggggcttccaccggctccatgaagtgtgcagccctagccacacagcgtgatggcagcagccactgccatcacaaggacccaaattcatttcttgcttcccctcctcttcctgcgcagagtccctgtgcttcagcactcagcgtgggcttccatttcccaaacagcaaataattcattcttttttaggccttggtatttgctgtcttctgcacccagaattctttccttactccctgccaggcccaggccaactctccaggctgacgtcactgcccttctggtacacacatcaacagcagttcttgttttaccattgtgtacagaattatttatgggcttgtctatcctacagaccgtgtggccataagctgtcagttgtgggtatcagcacacagcagggactcattaatgtttggggctttaaataaaaactcaagccagatgcagtggctcacacctgtaatcccaacactctggaggccaaggtgagaggattgcttgagccaaggtttaagaccagcctgggcagcatacccagaccccatctctaccaaaaaaaaaaaattatgtttttttgaggcagagtctagctttgtcgcccaggctggagtgcagtggcacaatcttggctcactgcaacctctgcctctcgggtttaagcgattatcccacctcaacctcccgtgtagctgggattacaggtgcccaccaccacgcccgctaatttttgtatttttagtagagatgggttttcaccatgttggccaggctaatcttgaactcctgacctcaaatgatccgcctgcctcagcctcccaaagtgctggattacaggtgagagccacctcacgtggcctctacaaaataatttttaaaattagccaggcattgagacttggcagagtgtgaggcaaaaaataaaataaataaaaaatacctaggtgtggtggtgcacacctgtagtcccagctactcaggagcctgaggcaggaggatcacttgaacccaagaggttgaagccacagtgagctatgatcatgccactgtactccagcctgggcatcaggacaagaccctgtctctaaaactaaattaaataataaataaatataagaatccccttggctgctacgtggagaatggacctaggggaagggcgagagtggaagcagagaaaccagtgaggatctgccgcagcagtccagacagatgctggaggccggggtgtgggtggagatgggaacagctggcagatgtatgtagtgggtatatcggatgggacttgctgatggggtgtacatggtgggtggaggagggaaaaatgaagaatggctatatccagcagtgcagcaggtgtacgtcgtccaggagttaactccgggcacggggacgaatgctacaggggaggcagggtgctcctgtccaactgtggccgaccctggggcagaagattgttaacgccgggcacagtggctcacgcctgtgataccaacactttaggaggctaaggagctcaagaccaccataggaacatagcaagatccctgtttccacaaaaatattgaacaattagccgggagtagtggcgcgcgcctgtagtctcagctcctcgggaggctggggtgggaagatcgcttgagcccaggagttcgaggatgcagtgagctatgatcgcaccactgcactctagcctgggcgacagagcgagaccctgtttcttaaaaaaaaaaaaaaaagtttagaacacgaaaaatcaaggcttcctcaactgaaaaccactttctcttgtgccgcccccttgactggatctcaggccaaaccccaacccgccccaacactttacccctaattcccggccccacagagccccacgcgcggcgggcgagcatctacttacgaaatgactcctgcggcctctccgaaatcccaggagcatccttgcagcgcgaggagaatggaccggggcctggactcatcagcagatctatccacagccagggaccactccctaaagcccgccgcaggcccagccctcacgctttctcttcgcaatggactttgcagcaaccacgtcggccattggctcagctcggccctcgaccaatcagagctaaggttacttccacaccggtcgttcttggcaaccagtgggtaccgttcaaatccccgccagggcggaaacgtccgcccttatccgttctcttattggtcaggttagacgtccatttctgacgccacagcctatccggcgctgcgggaggcggagggcgggctggatgaaggactgggcgagcaccgagggcgtgaacccggaaggtggcgcggccaccagtaacatgatctctagactgggacggtggggttcctgccggctgtattcgggccttggactggactgagaagctacggtgcggatccagctggggtatcaggggctaggcacgtgatgaaaatgaaggacgcggacaccaggacaggaatctcctggttcttagagaatttatttcgccacaaataattggcaaacgggatctcgctgtattgctcaggctggtctcgaactcctgggcacaagcgatcctcacgcctcagccttgcccaatgttgggattacagacgtgagctaccatgcccagcccaggattcttttaaaacttaaatctgatcgtgcctctggccttattggaatccaatgccattaccacctccaccaccacacatcccgtctccagccaccctggccttcattcaggcctttgtgttttctttttcttttcttttttttttttttttttgagacgagtcttgctctgtcgcccaggctggagtgcagtggcgcgatctcggctcactgcaacctccgccttccggattcaagcaattctctgcctcagcctcccaagtggctgggattacaggtgcccaccaccaagcccggctaatttttttgtatttttagtagagacgcggtttcactatcttggccaggctggtcttgaactcctgaccttgtgatccacccgcctcgctcggcctcccaaagtgctgggattacaggtgtgagccaccgcgcccagcctgtgttttcttattagtaattataaagggaatcttatttgacagttctttgacaaataattcagtttgcagaggggatcctgccccagaggccctggcttggagtggaatgcagggccgtgtgcaggagagcctgctcaagtgccgcctggcttttccctccttaggtggagaccatccatggaaaagaacccccctgatgatacgggccccgtgcacgtgcctttggggcatattgtggccaatgagaaatggcgcgggtcacagctggcgcaggagatgcaaggtcggtggcctgccctctgccagccctttcctcccctgacatattaaaaaaaaaaaatctgcctattattgccatcttttcatccaaagcttatggaactcattttcttctctgtattttaagggaaaattaagctcattttcgaggatggcttgacaccagacttttatctgtcgaacagatgctgcattctttatgtcaccgaagctgatttggtggcaggaaatggctacagaaagaggcttgttcgggttagaaatgtaagtattaggctgggtgctgtggctcacgccagtaatcccagcactttgggaggccaaggcgggtggatcacctgaggtcagtagttggagaccagcctggccaacatggtgaaaccctgtctctgctaaaaatacaaaaattagctgagtatggtggcgcacgcctgtaatcccagctactagggaggctgagacgggagaattgcttgagcctgggaggcagaggctgtagtgagccgagatcacgccactgcactccagcctgggcgacagagtgagattccaactcaaaaaacaaaaaacaaaaacaaaaaagaaatgtaagcattggattaaagaaactcgaacattgatttgtctcaccccacccttccctccatcccttggtatcatttatttaaaatcattggccaggtcaggcacgaagtgatagcattcttaacctgaaaagcaatttggttgcaaaatgacttactgtcttttttcctttcaagtccaataatcttaaaggaattgtagtcgttgaaaaaacccggatgagtgaacaatacttcccagccctacagaagtttactgtgctggaccttggaatggtgctgcttccagtggccagccagatggaagcatcctgcctcgtcatccagttggtgagtaccgattcctacaccttcgtggtagtcctgtcctcatggacactcagctgctctccagaagcaaccatcaatccaatctatgtcattctctgacttggtttataaaatctcttcgaggaatttaaatgcggaagctgcctctgcagccagctcagcttgtcacacactccaggcaagtgtatcacaaagtatacaagttggagacctgattttagattctcagggtgtgatggctccatcagtcattatcctgccctttcgctggtgaaaacgtcaacctagaggccaggcgtgatggctcatgcttgtaatcccagcactttgggaggcggaggcgggaggatcacttgaggccagcagttcgagaccagcctggccaacatggcaaaaccctgtctctactaaaaatacaaaaattagctgggcgtggtggtgggtgcatgtaatcccagctactccggaggctgaggcaggagaatcacctgaactgaggaggtggaggttgcagtgagtggagatgctccattgcactccagcctgagcaacaggagcgaaactttgtctcaaaaaaagaaagaaagaaagaaaatgttaactagaagctgctttgtctcatcccgtatttttgttaagcatcagcaccttgtgcaagttttttttttttcccttttttttgaggcggagtctcgctctgtcctacaggccagagtgcagtggtacaatcttggctcactgccatctccacctcccgggttcaagccattcttctgcctcagcctcccgagtagctgggactacaggcacgcaccaccacacccggctaatttttgtatttttagtagacagggtttcaccatattggccaggctggtctcaaactcctgacctcatgatccgcccaccttggcctcccaaagtgctgggattacaggtgtgagccaccatgcctgggcagtttttttttttttttagatagggtcttgctctgtcattccagctggagtgcagtggtgcaatcttggcttactgcaacctttgcctcctgggttcaagcgattctcctgcctcagcctccctagtacctgggattacaggcacccaccaccatgcccggctaatttttgtatttttagtagagataagagtttcaccatgttggccaggctagtctcaaactcctgacctcaggtgatctgcctgcctcagcctcccaaagttctgggccaccgcaccaaccaacacttttttttttttttttgagatggagtttcgctcttgttgctcaggttggagtgcaatgatgcagtctcggctcactgcaacctcctcctcctgagttcaagtgattctcctgcctcagcctcccgagtagctggaattacaggtgcccgccaccacgcccagctaatttgtattcttagtaaagacggggtttctccatgttggtcaggctggtctcgaactcccgacctcaggtgttgtgcccgcctcagcctcccaaagtgctgggattacagtcgtgagccatcgcgcccggccgccaacacttatttttaaaatcagtttagtagcttacgcctctgatcccagcatggggaacatcaattgtgtgtgtgtgttgtttgtttttttcacttttgttttctttgttatgtgtgtgttgtttttaaatcaccccctctgatgtggagctagagttgagagccacattgaagatgcaagcagccatgaatggttcacagatccctctctactatatcccttgcgtcaccgttcctaactttccttgatataacactgttgtctgccttagtataaccaccactaactagaccaggtttctcctttgaggcaggcttcctgcagctcctgcgtgaagtaggcctagtttaggtgtagccatcatttaatcctgcacaactgaaatgtttcttaatggaccaacagaaagtgtttgaattcatctgtgtgtttttctaaacattctgaaaacgcacatttttgtaaattaatgtcttaactcctttgtgtggttcacctttcaataattttactgatgtctgagaaattatattcatgatacatgaaaacatttgttcccttaagtcaagctgagccaaatggaaaaacgcaatttctacaaaacatattttaagaaaacggccagtcctccagagggcgctcacgtgctgttgctttcattgtggttcaggttcaagagcaaaccaaagagcccagtaagaaccctcttctcgggaagaaacgggccctgctgctgtctgagccttcgctccttcgaaccgtgcagcagatcccaggagttggaaaagttaaagctccccttctcctccagaagtttccaagcatccagcaactgagtaatgcttccattggggaactggagcaggtggtcggacaagcagtggcacagcagatccatgccttcttcacgcagcccaggtgagggctggcctcagggccacggcatcttctcctgagaccacaaacaccaggatcttgttttcagctttaaaaaccaagagaatgggccgggtgcactggctcacgcctctaatctcagcactttgggaggccgaagacagcggatcatctgaggtcaggagttcaagaccagcctggccaacatggagaaacccctaaaaataggaacaattagccaggcatggtgacaggtgcctgtaatcccagctacttgggaggccgaggcatgagaatcacttgaacccgggaggcggaggttgcagtgagctgagatcgtgccactgcactccagcctgggcaccagagcgagactccgtctcaaagaaaacaacaaaaaaaaaaaaaaaagaaaaaggattttctccagcagcaaccagtgaaagatgaggcgaggcttgaatggagcccgtgggtcgtcctgccttagcgtctgagttcagcttgtgaagttagtgggccgcagagggcactgccttcattctgctaagacgaaaagggctggtgggatcttcgcaagagagtcagggactcacactcagcaaaaagcattagggccgattttaatgtgcgaccttgacctgcatctgtcatggaaagtgccttctaaaaagcttcagtggtggatgtgaccatctgaaggaaacaaatgtacaaggaagcactgtgtatcctaagccctgggttcccagagtttcacctgctgttcatcaggtctggccttcatatacccgtactgcgagggctgtttccaatgtaaataaataactgcgcaacagttccttcctcctttcctttgttcctccctccccccggcctttttttttggcagatgtacagtttgtttataatcactgcatatgtcttctgcacacagaaagtatgaagtctgaagttcccacttaaagttgaaaactcaacggccgggcatagtggctcacacctgtaatcccagcactttgggaggccaaggggggtgaatcacaaggtcaggagatccagaccatcctggccgacatggtgaagccctgtctctactaaaaatacaaaaattagctgggtgtggtggcacacacctgtaatcccaactactcaggagactgaggcacgagaatcgcttgaacccaggaggtggaggttgcaatgggccgagattgcaccactgcactccagcctggatgacagagtgagactccatctcaaaaaaaaaaaaaaaaaatttaaagttgaaaactcaacatgcatgaggcagaacaggctgtgtttgtatatgaaaggcccaacaatggaaggatacaagaaaatgatggcagcagctgcatctagtgagggaagcaggggctggggatcaaaaggtacaaattgcccattcaaaaaatagacacaggccaggcacagtggctcacacctgtagtcccagcactttgggaggctgaggtgggaggattgcttgagtccaggatttcgagatcagcctgggcaacatggcaagaccccatctctacaaaaaaatcaaaaaaattagccaggcatggtggctcatgcctgtagtcccagctactcaggagggtgaggtgggaggattgcttgagcccggaaggttgaggctgccatgagccacaattgcgccactgtcctcctgcctgggtgacaaagcgagaccctgtcttgaaaaaaagacaaaaacaaaaaataagcacaaagataccatctgtcttagaaaatactaagataacttgacagctttttaagttctgctttgtgaaatgttagtaactaaaaaaatcagaacattagaaactgtgtgcattggggagaaacaatttgaaagaggagggaatgaaaatgaaataaaagtaaaaagaaatattaactcgggtaaatgaatatgtttatttaaatatgtatacaagcatggccctaggagcagcagatacactttcccaaaggtggttgcttcctttaagatattgcacaatagaaaataaactcttgtcaatccttaaaattagtcttcaatgctatgtattttagctatgtaacttgtactgtgtcaacagtgaaccttattagattcacggtgtcatcgaacttatagcaagataaaaatcaatcagtaggaatgtcattttaaaaagtaaaatagtgggacggttgtggtggctcatgcctgtaatcccagcactttgggaggctgaggtgggtggatcatttgaggtcaggatttcgaaacccgcctggccaacatggtgaaacctcacctcaactaaaaatacaaaaatcagccaggcatgctggagggcaccttgtagtcccagctatttgggaggctgaggtaggagaatcgcttgatcccagggggcggaggttgcactgagctgagatcacaccactgcactccagcctgggcaacacagcaagacgctatctcaaacaaaaaaaggaagtcaaatagagctttaaacctgaatcatttacatctttactttataaaatgtaaaactacttttttacccaagacttaaaatatagaattatgtaacttctactttaaacaaaatgaaaaatgttttgagtatcaaacagtatattatctaccttgtagacagcatcttcatctaacactgccactgtgttagtaattcttaaatgacatcaaactagaagaaaagctgctcctacattgtttttatttaataagacaaatttggcactagactttttctagaaatagcattcatagtctatcgatataatagtaacatcttgttttaggttaatgaattcctattaggaagcagcactttgggacagtttttagtgacactaatttaattctatcattacagtcctctgacctgccttaattccaggatcatctgaattctaggttaaggaatgattattagccaaacctggaaacaactacaaattgtactgatataggtaaccccaatttaatagtgactaaaagtcataattgtcaccattaaaaatagccatatttcatatcttcaacactattctatttacaatactttatataataaataacttacagcagtatagtaacacacctcaaaaaagttcttttttcactaattcctagaggtttcttggttactttccttcataaaaacacatcaaatgtgagtttacactatgagaaaaacaggatttgagaacagatagatagatattttccattatggcacaaacgtttaaggccgagtcagcaccggaaatgttcagggcctgaacatgtttgtttcctcacattagtaccaagaactgtctgagttgagaaggctgaaaggggagggcagcttcttcttgacctgaggccgtgcagccccgaccgatgggaggcacaaggtgctggctgacttctgtctgttcttgttggtgccccaactcaggaaggaaagcttcttggagattttcttggttttatcagttttgtcgtcatcatcaatggctaagcagatcatggagtacgttttctgcattcccacggagtatgtggcactcttattatgctgcacatagaaaagtaagaaaaagggcgtcaggcatcatcaagatagatgataaaaactacgaagtttggccaggcgcggtggctcacacctgtaatcccaacagtttgggaggccgaggaaggcggatcacttgaggtcaggagttcaagaccagcctggccaacatggtgaaaccccatctctactaaaatacaaaaattaaccaggtgtggtggtggatgtctgtagtcccagctgcttggagcctgggcacaagaatcacttgaacccaggaggtggaggttgcagtgagctgagatcacaccactgcactccaacctgggtgacagagcaggattctgtctccaaaaaataaattgaacagacataattcggaaactcaggtgaccaatgcttatatagaattaggttcttaaaacaaggacaaactttttttcttttttgagacagggtcttgctatgttgcccaggctggtcttaaactcctgggctcaagcgatcttcctgccttggcctcctgagtagctggggctctaggtgtgcaccaccaggtccaacaaggataattttttgtttgttttttgtttttgttttttaagacagagtctcactctgtcgcccaggctggagtgtagtggtacgatctcggctcactgtaagctccgcctcccgggttcacgccattctcctgcctcagcctctctgagtagctgggactacagacacccgccaccacacctggctaattttttgtatttttagtagagacggggtttcaccccttctcgatctcctgacctcgtgatccgcccgtcttggcctcccaaagtgctggaattataagcgtgagccaccacgcccggcccaacaaggataatttttaaggaatgtactcaatagtaacaatttaagcttaggagccacaactcatattttaaggttcttcttctatttgagaaagtaataatactcatggtcacgaatatgaaagtacagggtggggcgcggtggctcacaactacagtcccagctacctgggaggcttagaggggaagattgcttgagcccaggaggttgaggctatagtgagctgtgattgtgccactgcactccagcctgggcgacagagtgagacctctgtctcaaaataaaaaaaaagggggggggcggggggaagggaagaggggaaaggaagggaagaggggaaggaaagggaagaggagaagggaatggaagagggcaagggaagggaaaaaaaaaaaaagagtatgcagtgagcaataggtctccctgtcacctgggcttctaaggccctccatgttatacttctagagatgatgtacaagtatttctatatgtacctaagtatattaccattcattttcttaaaaggaatatactacactattctacacctgattttctttttttcttttttttctttttcctttttttttttttttttaagatggagtctcgctctgtcgcccaggctggagtgccatttttatcattttcaagtgtagagttcggtggcattaattacattcacatcattatgctccactgccaccatccatctctaaaactttttcatcttcctcagctgaaactttgtaccattaaacactctctactattaactttccaagaatcatgtaggattcaaactggaaatctaaggaagcttgctttctgaagacttccacatgggctatcaccggcttctaaggtttgcctaacattgagattgtttagttcgccacatgtttattgatggtctactatgttctggcactaaaattaggcatacaatatatcgctgcaatagttgaggacattgttcctaatataaaccctaagaggggccgggcacagtgtcttacacctgtaatcccaacattttgggaggctgagttgggcagatcacttgaggccaggagttcaagaccatcgtggccaacatggtgaaaccccatctctactaaaaatacaaaaatcagccaggtgtggtggtgcacacctgtaatcccagctactcaggagctgaggcagaagaatcacttgaacccaggaggcggaggttgcagtgagcccagatcacgccactgcactccagcctgggcgatggagtgagacgctattgcaaaaaataaataaataataaataaataaataaaataaaccctcagaggaatctgagttatgcagcaataaagtagggggtacttcgagcccctaaggatggagatgcctcttccttttctggaaaactgaccgctaactccaccatgttttacggagcacacacaatgtcatttaaaacaataataaaacgaataatcctggagacagatgtgaggcctgaaagcatttcccaaccctcagctgctcaaagtccattgtgtatcaaaaccactgccttataaataccctcagttctcttccatctgcccccactcgctcatctccaccctctgcctcccctagggcctgtatctgaaaggttgtgcgttgctggaggacactcaccaaggcttcccttggaattctaacctgaccccaaacctctaataggcacccatttcctggcacttctgtgtgtccctagtaatttcatttccttttctcctgtatacttgtttcttatcttcgctctcctcctgaagccactcacgcaccctcctgacatccctgccgtatacttcatggcatccgtcccccaagaccaagcccttctgtgtgcctggatcccattccctctctcctccaggcacccttgcctcccagatctctacacacacacacacacacacacacacacacacacacacactcctgcaatgcgtaccatcacattctttgaaaagcttttcttggcccagatctctacacacacacaaacacacacacacacacacacacacactcctgcaatgcgtaccatcacattctttgaaaagcctttcttggcggggcgtggtggctcacgcctgtaatcccagcactttgggaggccaaggcgggcagatcacaaggtcaggagattgagaccatcggggctaacatggtgaaaccctgtctctactaaaaatacaaaaaattagccgggcgtggtggcgggcacctgtagtcccagttacttgggaggctgaggcaggagaatggcatgaaccaggaggtggagcttgcagtgagctgagatagcgccactcactgcattccagcctgggtgacagaacgagactgtctcaaaaaaaaaaaagtaaagcctttcttgaccctgttcccctccaggtccaccccagtatcatacccacacacactctctcactcctgcaatgtgtaccactactttcttttaaaagcctttttttttttttttttttgagacggagtcttactgtcaccagactggagtgcagtggcccaatcttggctcactgcaacctccacctccaggttcaagtgattctcctgcctcagcctcccaagtagctgggattacaggcacatgccaccacacccagataatttttgtatttttagtagagacagggtttcaccatgttggccaggttggtcttgaacttctggcctcaagtgatccacctgcctcagcctcccaaagtgctgggattacaggcgtgagccactgtgcccagctccatttactgtttctttccccaccacccattcctcactcaaatccacctggggtacccctctagaactcttagggctttacagagcacagtttaaaaccactgtgtaggcctaactcttccatcctctggatgagaaaaccgaggcccaaggagggtatgaacgtgctgaaggttacacagcttgtgaacggcagtcagggcctaattccagagcttgattccaagcttagatttgttcaactagggatccccactgtagtcaagagggtagccaagggcagcaggtcatcagttcagccagagtgctaggctaaatgttctctttatttgattttgtttgaaaggctcagtcgctaaaaacagtgcttgactgtcattatctaaaatccttatcataaaaattaatagacaaaaataatttttaaaaaattatttttaaaaagccaggggctgggcatggtggctcactcctgtaatcccagcacttttgggaggccaaggcgggccaatcaccggaggccaggagttcaagatcagcctggccaatatggtgaaaccccatctctactaaaaatacaaaaattagccagacatcgtggtgggtgcatgtaatcccagctactcgggaggctgaggcaggagaatcgcttgaacccgggaggtgaggttgcagtgagccaagattgcaccactgcactccagcctggatgacaagagcaagactctgtctccaaaaaaaaagagccaggtacagtggctcacgcctgtaatcccaactattcgggaggctgattcaagagggtctcttgaggctagaaattcaagatcagcttggataacttagttagacctcgtcaccacaaaattaattaataaaagacaaaaggaaattacttttggcctggtgcagtggctcattcctgtaatcctaacactttgggaggcggaggcaggcagattgcttaagcccaggagtttgggaccagcctgggcaacaaaatgagactgtcactacaaaaaaattaaaaattagctgggtatagtggtgcacgcctatagtcccagctacttggtaggatttttttttttgagatggagtctccctctcttgcacaggctggagtgcagtggcacaatctcggctcactgcaacctctgcctcctgggttcaagcaattctcctgccttggcctcccaagtagctgggattacaggcgcccgccaccaccacgcccagggttttgccatgttgaccaggctggtctccaactcctgacctcaggtgatgagaagggaggatcttttgagtcctagaactcgaagctgtagtcagctatgattgcactattgcactccagcctgggcaactgagttagaccctgtctcaaaacaaacaaaacaaaaaacaacaacaaaagaaattatttggccgggcatgctggcttatgcctgtaatcccggcactttgggaggcaaggtaggcggattgcttgagcttagaagttagagaacagctagggcaacacggtgaagccccgtctctacaaaaaatacgaaaaattagctgggtatggtgttccatgcctgtagtcctagctactcaggaagcggagatgggaggatcacgtaagcccaagagtcaaggccacagtgaaccgatattgcgccagggcaacgagagcgagaccctgtctcaaaacaaaaaacaaaccttcttttttctagacagggtctcactctgtcacgcaggctggagtacagtggctcgatctcggctcactgcaacctctgcctcccaggctcaagtgattctcatgcctcagcctcccacatagctgggattgcaggcatgcaccaccacatcctgctaatttttgtatttttagtagagacagggttttgccacggtggccaggatggtctcgaactcctggcttcaagtgatccgccggccttggcctcccaaagtactaggattataggagtgagccactgtgcccagcctaaaaacattatttttaaaaaaattaaagaggacctgctaggtgaaaagaataaacatcatgatcatggttatcatcattataatgtctattgtggattgaaatgtagctcctgtttggccctcttgtaagggctttatgtaaactcagtttatcctgaggctcacagctattccctgacttgctgaaggccacacaactggtggtggaaagccaggatacacatctagactgtctgagtgcagaacccttgctttcagctactacagcagccccttccttggcctggtgtaacgatgtcacaggcttgaaagtcaagcctttgcacctctcacagggggcagggcatgccccagaaactcaggcctctgctgatggggtccctactccaaccttcagtgtgtggcttggctcttttctctaacctccttttggacaaacgtcttttctgtttctgctggggaccttaatcacttgtccagaaactccatggattttgtccctaaaaatatgatttcttatgatcccttctcccaagatgctctgagtcccttgactttatcttcttttaaaatttgaagtatgtcgggtgaggtggctcacgcctgtaatcccagtactttgggaggctaaggtagatggatctcgaggtcaggagttcgagaccagcctgaccaacatggagaaaccctgtctccactaaaaatacaaaaattagccaggcatagtggtgcccacctataatcccagtcactcgggaagctgaggcaggagaatcacttgaatccaggaggcggaggttgcagtgagccgagatcacgccactgcactccagcctaggaaatagtgcaagactctgtctcaaaaaaaaaaaaaaaaaattttgagatataattcacatacatgcataaaattcaccattttaatacccttctgtggcttttatttattatttttatttttgagacagggtcttgctctgacacccaggctggagtgcagtggtacaatcatagctcactgcagccccaacctccttgggctcaagtgatcctcctgcctcagcctcccaagcagctgggactacaggcatacgccaccatgcctcgctaattttttttattttttgtagagacaaggtctcgccatgttgcccaggctggtctcgaactcctgggctcaagcgaacatactgcctcagcctctcaaagtgctggaattacaggtgtgagccagcatgccaagacaccagtgatttttagtatattcacaaagttaggtgaccatcactactacctaatttcagaacatttccatccccctaaaaagaaaccttctaccttatgacccttcagcagtccctcccgactcccattgcccagccccagcaccatctactttttgtctctggatttgcctatgctgagcattttatatccatggactcaaaatccattggctctctggccctctctcaactgacttctgctgccacctctccaccaaagtgtcttttcatcctgctgccaaatacaataggcacagctaaggcgacctcattctccaccactcaactgcattcaatgcaacccatcaccctctcactgcaaagctttctcctcttaatttgagaagctcctttcctccgacatctctgaactctcctccattttctttgcacttgcttctcttccaactgatctctaaatgtttagccctcagccctagcccccttgcagggagctgcattttgtctcacagcctcaaatatcatccctgtgcaatgattctcaaatatttatttctagctctgatttcttcctcgaactgtaagacttcacattcgatctcctcctttatgcttacgtctgactgctaatagcatctggaacattcaaaacatgactcttgatttctctctccttcacctccctcacacccattacccatcattatgaaaaataaccaggccaggcatggtggctcatgcctgtaatcccaacactttgggaggcggaggtgggaggatcgcttaaggccaggagtttgaggccaaccttggcaatatataaaggccccatctctaccaaaaaaaatttaccatagatagataaacaaattagccaggcatagtggtacacacctgtagttccagctactcgggaggctgaggcaaaaggattgcctgagcctaggaagtcaaggctacagtgagctacgattgcaccactgcattccagccaagcaacagagtgagaccctgtctcaaaaacaacaacaacaaaaaaaaaaacaaaacaaacaaaacaacaacaacagaaaaaagaaattaaaggtagaaaaataaccactacccatgagattgatcaagccaaaaactgaggcctcacctccctgtccactgtctccttaacacaaatcatccacaaatcccccatcagctctacctccaaactatgtcccagggccactcatgtctctctaactctacagccacccccatcacctcagccactaatgtcaccagcctggacaagtgccatggccagtctccggcagcagacgcccttctaaaacaaacatcacaccacgccgttccccttctgaaaggggcttccaagtggcttccaagctcccaccattgccgccaaggcctccttcttacctcacttcccatggctcccttccttgtcctggtgctcttgccaaaaggccttctttttgcctctccggtaggagaagcttattctgctgcaggggctctgtacctgtaagtgcccctgcccagaaggcctttcttgtccctctgcaactggctcgaacctcctggtcactctcatgtctggtccatccctgcctagatagagcctcgccccctccccagtcattccaccctgttacaggtcttttttcctttacagcacttatcaaaatcctgaacatttatttgctgactttaatgccagcttcgctggggggcagggaccttatctgtgtaatgtaaactggagctctgacacctaagagagtgtctggcacccaactgatcctcaatcaatatttgttgaatgaataaatgagtgttgttacagagggaaggtcgagggtacatcattaagtgtggcaaagtgcagaggagaacgtcattaagtatggcatgaatcctagcacttggggaaaattttagggtttttttgcagacagagtctcactctgttgcccaggctggagtgcaatggcgcgatctccactcactgcaacctccacctcccaggttcaaactgttctcctgcctcagcctcctgagtagctggggttacaggcgtgcaccaccatgcccagctaatttttatattttcagtagagacagtgtttgccttgttggtcaggctggtcttcaactcctgacttcaagcaatctgcccacctcagcctccaaaagtactcagattacaggcatgagcaccgtgcctggcctcacgtggggaaaattaaaggcggtaactgtgcaggtgaacttgaagacactcaaatgcttcccaaatctcccaggacatggctgacactgcctctagggcgtacagagggattgtcttaactttcacaggttgtcttaagcacttctgtaccattagaatttttttttgttttttatttttttcactatgagtatgtattacttttgtaattaaacaatttgatcagaaaaatagatcagttgattattttatctacaggatatttttaaaagtttgctagcagggtgcagtggctcacgcctgtaatcccagcactttgggaggccaaggtgagaggatggcttgagcccaggagttcaagaccagccttggcaacatagcaagaacctgtctctacaaaaaaataaagaataggctgggcatggtggctcacgcctgtaatcccagcactctgggaggccgaggctggcagatcacaaggtcaggagatcgagtccagcctggctaacacggtgagacccccgtctctactaaaaatacaaaaaattagccaggcatgttggcaggcgcctgtagtcccacctgcttgggaggctgaggcaggagaatggtgtgaacccggaaggcagagcttgcagtgagccaagattgcaccactgcactccagcctgggtgacagagcgagactccgtctcaaaaaaaaaataaaattaaaaaagaaaatgaataaagaaagaaagaaagaaagaaagaaagagcgagccaggggtggtagtgggtgcctataattccagctgctcgtgtggctgaggtgggaggatcacttaaacccaagagatagaggctgcagtaagccatgatcataccactgcaaaccagcctgggcaatagggcaagacgctgtctttaaaaagaaaaagtttgccaattttctctttgacccaaggtgagcacattacagtgattacaagcctgggagtccagtcatttgtaccatgttacacaggcaggagacagagggtctggtaaacacctctggggctgaactcatgcagatttcactccacgccaccactgactgcccagggaggtgtcagcgctcaccatggatgatgtggagtccaggaggctcacgactttcatctcgatctcgtcctcgccaaagctcttcagcagcttcataacctcactcagcgtcagccacttacaatccacaagctgaatggagacaatataatctccttcccgggctcctgccacctgaaaaagtattgttgaaattaagtcaacgttttgttcactcaaatccttgaatcagtccccattaacaaaataggtatttgcgtaagttcgcatcaagaaagcaaaaattcactttgggtggctgagacgggtagatcacttgaggtcagtagttcaagaccagcctgtacaacacggtgaaacccatctctactaaaaatacaaaaatcagccaggtgtggtggtgggcacctgtagtcctagctacttgggaggctgaggcaggagaattgcttgaacccgggaggcagacattgcagtgagccgagatcgtgccactgccctccagcctgggtgcaattaaaaaaaaaaaaaaaaagccaaaattggccaggcacagtggctcacgcctgtaatcctagcactctgggaggccaaggcagacagaatacttgaggccaggagttcgagaccagcctggccaacatggcaaaaccccatttctactaaaaatacaaaaattaggccgggccaggtggctcacacttgtaatcccagcactttgggaggccgaggtaggcggatcacaagatcaggagatcgaaaccatcctggctaacacagtgaaaccccgtctctactaaaaacacacaaaaaattagccaggcatggtggcacgcacctgtaatcccagctactcagcagcctgaggcaggagaattacttgaacccaggaggtggaggttgcagtgaaccaagatcgcgccactgcactccagcctgggcgacagagtgagactgcgtctcaaaaaacaaaaacaaaaactaaaattagctgagtgtggtggcacgtgcctgtaatcccagctactcaggaagctgagacaggagaatcacttgaaaccaggaagcagaagctgcagtgagccctgagatcgcgccactgcacgatcgcgactcactgcagcctccacctcccaaagtctaaaaaaaactaaaaacataaaacaaacaaaagaaagacagtaaaaattaatccttttcttttagggaatgtagcacccatgaggcccttcacatcaagtcaggcctttgacatgggtgaacccaccctaaattcaatcacccagatatctgtgtttgctgccaatcaagaaaagcatgtgcttaccgaggcagagcagtaaggatccaggaagtgaacctgaacgggggcgttccctctcaaggtgaaccccaagtccccttcttctgcagtgaagcggatgcttcgaggaggcgtccaccgcttgttagccgaaaacacagataaggggccctttggaagagagcatcgttaggtgtaggatttgaaggctggatcagacgcttgaaagctaaagggaattttgcctgctgtccttgaagatctcacttggccttgttcagggacaaatgacacatctgggggcatacatgctacagcagtcatgcgagaacctggaaagccatcttctcaaacatacccaatatattttcaataaaattatcttttaggcattgtattaattatctttttctctttttttttgagacattgtctcactctgtcgcccaggctagagtgtggtggtatgatctcggctcactgcagcctctgcctcccgggttcaagtaattctcctgagtagctggaattacaggtgcgaaccaccatgcctggctaatttttgtatttttagcagagatggggtttcaccatgttggccaggctggtctcaaactcctgacctcaggtgatccgcccgcctcagcctcccaaagtgctgggattaaaggcgtgagccaccgcacccggccaaaattatcataaataaaatctctaatataaaaaatgtaagactaggcatgtcatgcctgtaatcctaagcactttgtgtgaccaaggcagaaggatcgctcgaggccaggggtttgagaccagcctaggcaatatagtgggaaccattctctactaaaaacataaaagaattagccaggcatggtggtgcacgccaatgctcccatctactcaggctgctgaggcaggaggacttcttgagcccaggagttcgaggctgcagtgaactatgattgtgccactgcactccagcctgggtgaaaacagagttagaccctgtcttaaaaaaaaaaaaaaaaaaggaaaaaaatctcaggccaggcacagtggctcatacctgtaatcccagcactctgggacgcctaggcaggagtatggtttgagcccaggagttggagaccagcctaggcaagaccccatctctacaagaaatgaaaattagttggacatggtggtgtgtacctgtagtcccatctactagggtagctaaggcaggaggatcgcttgagcccagaaggttcaggctgcagtgagctatgatcatgccgctgtaatccagcctaggtgacacagtgagaccatgtctctaaaaaaactaaaaaatatttttaaaaaattttaaatagacaatacctaaaaactacctttaaaatatgctatggggccgggcacagtggctcaggcctgtaatcccagcactttgggaggctgaggtgagcggatcactggagcccaggagttcaagatcagcctggccaacatggtgaaaccccgtctctactaaaaatacaaaattagctgagcgtagtggcacaggcctgtaatcccaactactcgggaggctgaagctggagaatcacttgaacctgggaggcggaggctgcagtgagctgagatcgcaccactgcactccagcctgggcaacagagtgagactctgtctcaaaaaacaaataaataaaaataaatgaataaaataaaatatgctatggtctgaatgtttgtaccctcccaaagtttgtatattaaaatattaaaattttattaatatttattaaaatttaaaatgtatattaaaatcatcaatgtaattattaggaagtggggcctctcgagaggtgattcagtcttggggtggaaccctcaagaatgggatacatgcttttaaaacaggcccaaggaagctcatcaccttttctgccatgaggacacaggtagaaggccccacctataaaccagaacatgggccttcagcagataccgaatctgcccataccttggtcttggacttcccagcctccggaactaagaaatatatttctgctgtcataagccccccagtttgaggcattttgttatagcagcccacatggactaagacaccatactcgccaaagtgaagagctgtccccttaggtcatttgaatgtagagagcattcaacataccagcttctggaagaagtccgtgactgtcagcttggagaactggggcaatataatgtcaacctcttgctcagttttagctagaatagaggattagaaatgggaggataaacgtttctgtaattgaaagtgatcctaatagtccagtgttgtggctcacgcctgtaatcccagcactttgggaggctgaggcaggtggatcacttgaggccataagttcaagaccagtctagccagcatggtgaaaccccatctctattaaaaatacaaaaattagccaggtatggtggcaggtgactgtaatccgagttacttgggaggctgaggcaggagaatcacttgaacccaggaggcagaggctgcagtgagttgaagtcatgccactgcactccagcctgggtgacagagtcagactccggggggaaaaaaaaagtgatccttgggaaggagacagtacagaactttctcttagtcacacatccttcccctcggtttagacaagtagcagaagaagatggaacagagctcaacccccgacctagggtgaactgtaccttccatttgggtgcctccagtgagccatgggaggtataactccttcccgagctgggaccaaggagtgataaccagacacattcccatggggtttcctgatacttaaggggcttagtgggcttctctggcactcataaaaccctaatgaggaggccaggcacggtggctaatgcttgtaatcccagcactttgggaggccacggtgggaggatcatctgaggtcaagagttcaagaccagcctggccaacatgatgaaaccccatctctactaaaaatacaaaaaattagccaggcgtggtggcatgcgcctatagtcccagctacttgggaggctgaggcttgaaccagggaggcagaggttgcagtgagctgagatcacgccactgcactccagcctgggtgagacaagagcgaaatgacctctcaaaaacaaacaaacaaacaaaaaaacctattgagaagtcatctatgtttcaagtgttgttgttatggaagttccatgcctcactggacacagtcctgggataccgtgctttctgttttcatcattattactattttgagacagggtgtcgctctgtcgcccaagctggagtgcagtggtgggatcacagctcgcttgcagcttgacctcctggactcaaatgattctcctgcctcagcctcccgagtagctggaactataggtatgcaccaccacacctgatgaattttttttttaattttttgtagagatggggtctcactatgttgcccaggctggtctcaaactcctgagctcaagtaatcctcctgcctcggcctcccaaagtgctgagattacaggtttgagccaccgtgcttgaccttttcattattaatgtggtatgaggatttcccagtgaaaaggaggtttggcaaatcatgaccactgacagctacatacccccaccagcatcttcacagcaggctcggactacccttaacataaggctggtcaatttctaacaaaggatcccagggcaggctgattctacacgagaacaaacagcataaaaagtgtatctaggccaggtgtggtggcttaccctggtaatcccagcactttgggaggccaaggcaggtggatcacttgaggtcaggagttcgagaccagcctggccaacatggtgaaaccccatctctactaaaaatccaaaaattagctgggtgtggtggtgggtgcttgtaatcccagctcctcgggaggctgaggcagaagaatcacttgaacccgggaagcagaggttgcagtgagccgagatcacgccactgcactccagcctgggcaacagagcgagactccatctcaaaaagaaaagagaactccagggcaaaagcagcacctcagtccctaccctgtgcagctctccttgtgccaagcacacagcgagggctcgctcaacccccacaggccaggcgtactctttccgcggcacaggcacccccacagagggaacacagtctaggctactcaccaacaacactgggggcgtcgatcaggttcagcaggtcatcctcctcctggtgctgggcgtacgtgagccgggagcgttcctgtgcggcacacagcaccttctgtagcacctcaatgctccgcagcttcttgcagaggctggcctcccgcaccgactcctcgtgatgagccatggctctgcgcaagtgggacttccctgcagacggaagccagcacccacgtgacttgcagatccaccaagcagagcataaaggcccaaggggcagcccaagaggttggatgttctcttttctaaaggatctgcctggatagctagagcctgtgataccctaccttgttttaacctgagtgactctctcctagcagagagagccggacagactccattttagtttcttcacttgcagcccccacttatcccccttaagagaataactagtgtaagctgactccaagcacacccaggaatgcaaactgctgataagatactgaggcaggctgtaccagcagctcctggggatgtgctcagtggcaggtacctaaagcccctgcatttatctcttagtgatagtttaagcccctgcacctggaactgtgtattttttgtaactgcttctataaccaattacttttttttaactttttgcctattctgcttctgtaaaattgcttcagttaaacccccctcccctatttagaccatagtataaaagaaaatctagccccttcttcgggcccgagagaatttcgagcgttagccgtctctcagtcaccggctaataaaggactcctgaattagtctcaaagtgtggcatttctctataactcgcttggttacaacaagccttttattaaaatattatttttttcattttatattttatatttagagacagggtctcactttgtttcgcacgctggagtacagtggtgcaatcatggcttaccgcagcctcaaactcctgggctgaactgaacctccctcttctgactcttgagcagctgggaccacaggcatgcaccaccacacttggataatgttttcactatcatcatcatttcattatcattgctatgttgcccaggctggtctcaaactcctggcctcaagcaatctgcctgccttagcctcccagactgctgggatgacaggcgtgagtcaccgcgcccagcccaagcctcccttcaatgcgtatgtaataacctcacttgtgtccataagatgttcactcaacaaatatttaccaaatgtgctgggcactagagataaagcaacgagtaaacaaactgcccccacattcatggagtttacatgtagtggttgacgacagataactaacaagacaagaaatatgtaatggatggggtggtgatgaggttatagggaaaaataaagcagggtaagcggagatggtaagagaagactgggaatggggttgtcctatgatgggtgacagagaaaggctttttttttttctttcttgagacggagtcttgctctgtcacccaggctggaatgcagtggcacgatctcggctcactgcaacctccacctcccaggttcaagcaattctcccacctcagcctcccaagtagctggaactacaggcacacaccaccacatctggctaagtttttgtatttttggtacagacggggtttctccatgttgcccaggctggtctcaaactcctgacttcaagccatcctcccacctctgcctcccaaagtgctgggattgcaggtgtgagccaccacacccggccaaggaaagctttgtgatatggtcctttttgagcagagccctgattgatgtgaaagagcagcaggtgcgagggccctggggcaggggcacgtgcaggttttcaagggcaaggaggagctagggtgtgcctggaggcagggagggtgggagagaatgagtgcagggaagaaagagccaggccagatcatggcggacctcacgcgtgtgagatgagggctctcgctcctgttctgcgtgagacgggagcccactggagtgagagcaggggactgatgtgatctgacctgcacgaccaggctctgaaggggcagcaggaaaacccgctatgagcagggcaagccacgtgacctctctgggtctcagtttcctcagctgtaaaatggggatgccacgagacgcacctcatagtgttgtgtggggtttaagtgagtgaatgtttgttaaataagcactgtacacatgtggcttccaccagggcagcaggattaaagtggccagatttgagatatgttttctaagtacagccaaagggatttgctaatcaaatgtagggtgagaaagtaagacaagaggttaggtgtggtggctcatgcctgtaaacccagcactttgggagacagaggcaggaggatcgctggaggccaggagttcaaaaccagcctgggcaacatagtgagaccgcatctctacaaaaacctttttacaatattagccgggcgtggtggtgcatgcctgtagtcccagctactcaggaggctgaggcaggaagatcacttgaagccaggagttcgaggctgcactgagctgtgattgcactactgcactgcagcctgggggacagcaagatgctgtcaaagaaaacaaatgaaagaaaaggaaagaggaaaggagggaggacgggtagatggggaggagagagagagaaaggaaagaaggaaagaataaaggagagaggagaggaaagggagagaaaaggaaagcaacaaggaacaaggaaaggagaggagaggggaggggaggaggggagaggggaagggtgaggggaggagaggaaggaggggagggagagggaggaccagaggagagaggaaaggaggggagaagagaggaggagagagaaggggagcggagggtaacaggggagggaagaggagaggagagaacaggagaggaggggaagggaggggaacagaggggaggagaggggaggggagcagaggggaggggatgggaaagaggaggaaagaaaagaagcgtggagagtgagtccaaggtttctggcctgagcacctagaggggtgggagttgccatcactgagacggagaagctgcgtatgtgtgcatgggtggtgcgcagaggggcaggttagggtggtggaggtgaggtctgcacatgggaagagatattcacactgagacatggcagagaccaaaccaggacactgcattaccagtcattaggtgttcttggtaattcagccatgcataaggaaatcaacaaacgtctccttccctgttagcgtgacacatgccaccctgtggaccccaagggagatggttaaagtcctggctccacagtgggaggcctgggtgctatggaacccatgagaacacagcctgggaagccctctgaggctcaggaccgcgcctcatgacttctgaacccaaagtggccacgatgactcggaacacccccctctcccgggccctcttcagggacctctctgtggctggctgtgagcaggaccagctgggcaccaagtggggcccacatctgggtgcagggggacacgcacccagctgtcggcgctgctgatcattcttcagtgtggccaagggtgtcagcccctctggcatgtggtcgtagagctgggacaggcacttctcctggtggtccagatccgtgcctggcttcactgcaaagagaaccacaggttaaatcccctctcatggacctggccacagacccacgtagagatttctctaccatgtctccagcttccttttttctgcagtttcacaaggcatttgggatcatgggtctcctttctgcccccggacacaccccaggccgtctaaccctcaaggttttcttttctttgagacggtctcactctgttaccaggctggagtgcaatggcacaatcatagttcactgccgccttgaactcctgggctcaagtgatcctcccacctcacctcctgagtagttaggactacagacatgcaccaccacatgccaggctaatttttaaatttttttgtaaagacaaggtcttgctacattgcccaggctggtctcaaacccctgggttcaaacgatcctcctgccttagcctcccaaagtgctgggatcaaatgtgtgagccactatgcctggctaccccaaagctcttgctcactgggaccagtcacactccagaggttcataatttttttttttttttttgagatggagtttcgctctgtcacccaggcttgggtgcagtggtgtgatcttggctcactgcaacctccacctcccgggttcaagcgattctcctgcctcagcctcccgagtagctgggattacaggcacatgccaccatgcccggctaatttttgtatttttagtagagatggggtttcagcatcttggccaggctggtcctgacctcgtgatccacaccgatttcggcctcccaaagtgctgggattataggcgtgagccaccacacccggcaaggtttgtaatttgaccctgagcccccacacgctacctcctccaactcacccaccacacagaacctcctggcatagcccagaccctgtcatgcccggcctgcacccctctgcgggcctgcacacctgcagcagagccccttcctgcttcaaccacacccttcgtggcgcgcatcctgctctcaaacctcacaaaaccactctccacttccccagcaccctccgcctctgttctgtgctcagacactttactccctctaggctgacccttccctcctgtgcagatggaaaagttgaactcaaatgtcactgcctctaagaagccatccatgactgtaccatggagtccacctgctgctgcatttgtgtctctacagcaatcaccgaggcactatatggtatttctatttgttttcacatcttgtctcacctaatagactatatagtactaggagtggcggctcacactttcagagaacctacagtatataaagcattattgagctttgcgtacaggcccttcgttttcgttttcatgacagcctgtgaggcaggttctctccatatacccattttacagatgagaaaattgaggcagaggacagctaagtaacttgcccaaggtaaaacagctcattcatggaagagctgagatatgaacccaggaagtctggctccagaggctgtctttttaattccttgggaggctgcctggattagtactcattagatcaaaaatccctggccaggcaccatggctcatgcctgtaatcccaacactttggggaggccaaggcaggacaactgcttgaggccaagagtttgaaaccaacttaggcaacatagtgagactccatctctataaaaaaaaaattttttttaattaactggtgtagtggcatgtgcctgtattcccagctatttgggaggctgaattgggaggatcgcttgagcccaggagttcaagaaggcagtgagccatgatcataccactgcactccagccccatctctaacaataaaataaaataaataaaataataaaataaaataaaattccgatcatcacagattttttttgcattaatttttattttattattattagtttttttgagatggagtcttgctctgtcacccaggctggagtgcagtggcacaatctcggctcactgcaacctccacctccctggctcaagccattctcctgcctcagtcacccgagtagctaggattagaggcacgtgccatgccctgctaatttttgtatttttagtagagacagggtttcaccatgttggccaggctggtctcaaactcctgacctcaaatgatctgcctgccttggcctcccaaagtgctgagattacaggcatgagccacagcacctggcctgcattaattttgattcttttaaaatattaccttaaaatgttacttatcttgatgccagcatttttggccttcccttagattctagattccaggtgaaaattcatcctcttgcacccaggcagaattaaaggtgcctcttcttcctccctctaaagaagcttataacccctaaccccaccatggcctgtgcggcagctgcctcagtcatgggtcactcccatcctctgccttcagcctgtgagcatctccagggaaggcagttagctctcactcagctcagaatcgcccctggggcagctggaccacagccctcgccaaactcccgaaccccccaggccttaccctggtggtcgatgaggaggatggcagtgaagtagtgggccagggccgcgtagtggtgggccttcacgcaggctaagctggcccaggagtaggggatgttctctttcaccggcgcctggctcatggctgcgtgtagctgttggtagacctctcccacctgaaatagaagggacactgggaaggggcagcccggcacaagggccctcatgaacccatttgcagagaaagagccctttcttcttcccatgcaacagcccctgccaggggctgctccagaatctgggagcaactccaagagacccctcgttctgtcattgtcacagttaacagggggatcaggctgctgtcattatgctggtttttaggttaagctgcagatggaatcagtgatctgtatctgaaacaccaacacttgccaagaaaactcaagccagcagtactggccggagctggcacaatgcccaggtcacaggcaagctcccatgggaaggccccgctacttccagtgctcctgtgccagcatctcctgcccactccccaaagtcacaggaaccagggagtcctaccttagcagcctcctgagccaccttcaccagcatgaagaattcattccggatcccaggaaggctgattttctcaaacacgctttcttgggcttgtgcaagcatcattttgacgagcacgctgagcatggcagggctcatgtcgtaacttggagtatgggtaaatgtgtctttcaggtaatttaaaacccctaaaagtggaaaatgttttgcccattagttcgggttcatatttacttcatcacgttgctatagagaaagataggaggccgagtgcggtggctcatgcccataatcccaacactttgggaggccgaagtgagcagatcacttgtatcaggaattcaagaccagcgtgggcaacgtggtgaaaccctgtctctacaaaaaatacaaaaattagccgggtgtgatggtgtgcgactatagtctcagctcctctggaggctgaggcaggaggattgcttgagcccaggaggcagaggttgcagtgagctgagatctcactactgcactccagcctgggtgacagagcaagactctgtctcaaaaaaaaaaaaaaaaaaaaaaaaaggaaaagacaggagaaaaaaaaaagaaccggtgtcctacaacatattaaaaaatttgattctcaattatatggtccagcaattccactcctatgatatatatccccaaacaattgaaagtgggggcttaaatgacacttgaacacccgtgttaatagcaacattattcacaagagctgaaaagtggaaaccacccagacgtccatgagcagatgaatgattaaacacaatgtggcctatccatacaacagaatatttttcagccttaaaaaggaatgaaattctgacacatggtacagtgtaaataaggacattatgctaagtgaaacaagccagtcacaaaaggaccaatattgtaggattccatttagataaggtacccggaatagtcaaattcacagaaatagaaaggagaatagaggttagctggggctggaaaagcgggcaatgggaagttattgtttaactgagtacagagctttgctttggatgatgaaaaagttccggagatagctgggcacaggggctgctgcctgtaatcccagctataaaggaggctgaggtgggagggttgcttgacattaagagttcaagaccagcctgggcaacgtactgagacccctgtctcttaaaaaatatatactttttaaaaatgtatttattttatttatttttgagacaagatcacactctgttgcccagactggagtgcggtggcacaatcatggctcactgcagcctcaaactcctgggctcaagcggtcctcccacctcagtctcctgaagagctgggactacagccatgtgccaccctacaccaagctaattttaaaattttttgtacagatggggtgtccctatgttgctcagactggtctccactcttggattcaagtgatcctcctgactcagcctcccaaagtgctgagattacaggtgtgagccaccttgcctaaccaacaaaaaaagtttttaacttctggagatgtttagtggtaatggctgcacaacactatgaatgtacaaatgcacttaatgccattgaactgcacacttaaaaatggttaaaatgtgcttctggttggcaggataattttaaaatttttaaaatttaagataataattaaaatggtaattttatgttctgtgttattttactataataaaaaaactggttaaaatagtacattttaagttatatatgtatattttaacactatttatttatttatttataaataaacacccaggctggagtgcagtggtgtgatttcagttcactgcaacctctgcctcccaggttcaagcgatcctcctgcctcagcctcccaagtagcagggattacaggtgtccaccaccacacccagctaatttttgtatttttagtacagacggggtttcaccatgttggccaggctggtctcgaactcctgacctcaggtgatctgcctgcctcggccactgaaagtgctgggataacaggcgtgagccaccccacccagccttttaacccaatttttaaaaattggattaccttccaaaacacatctctattgagtaaagaaaccagcctgctccccacaactcctgtgtcacctgggacaaaattccatcacgacaggtatggagatgcaagcagacggcaggcagaaggactaaggggctcacaggggaccaggctcacacataagatctgagtcattcagcagtccagggcttttcccctggacctcaagaaagatctattctggccaggcgtggtggctcatgcctctaatcccagcactttgggaggccgaggtgggcggatcacctgaggtcaggagttcaagaccagcctggccaacatggcaaaagcccatctctaccaaaaatacaaaattagccaggtgtggtggtgcacgcctataatcccagctactccggaggctgaggcaggagaatcacttgaacccgggaagcagaggctgcagtgagccgagatctcgccactgcactccagcctgggcgacagagtgagattctgtctcaaaaaaaaaaaaaaaaaaaaaaaaatctcaatccgtctgctccaatggaaattttcatgctgcagccttcctctgacttctttgtagtttagaaaattaactgtccaaagcgctaactgacaatcaatctggaactgaaatagaatctctcatatgaatcccatccaactggttcctctggttttgttgctgagcaaaaaaaaaaaaaaaaaagccctgccctgcggagggatggcacctgctgttttgagctgcgagctccatgggggttccctcacactccccactgttctcctacttgcttcatttcgtctatagtttgtctccattgatataatctcagagacaggacacagagtgcctgcctaagattcctcagaaagatgagtccagaaaaaagatttacagcaaaagaaatcaactcatacttggaatcttagcatatcgcttcatcccgatagaccaatcttttatttttttaattaattaattattttttgggacagggtcttgctctgtcgcccaagctggagtgcaatggcgcgatcttggcttaccacaacctcggctgatccttctgtctcagcctcccaagtagctgagactacaggcatgcaccaccaggcccagctaacttttgtactttttgtagagatggagtttcgccttgttgcccagactgatctcaaattcctgggctccagcaatccacccacctcagcctcctaaagtgctgggattacaggcatgagccaccatgcccagcctatttcattaatttaaaaaaaaaaaattctttttagggatggagtcttactctgtcacccaggctagagtacagtggtgcaatcatagctcactgcagcctcaaactcctgggcttaagtgatcttcccgtcttagccactggagtagctggaactacgggcatacaccaccacgcctggctaatttttaaatattttgtagagatggggtcctcctgtgtggcccaggctggtaggaccaatcattataacatcagaaatttcacgatgagtcaaagtggcaaagctatggttcttcacaagcttgcagggcaaagtgatatcaaacaatgatccacacgggtggaaggggatcacaccccaaagcagaatgtcgatgatcagcccagaaggcaacacgctatagagctagcgtggggaacacactgtggtctacactgtgccctgctcttgcatccatccccacgtggagtctgacccagacacagccctgctatgggggagcaaggcagaacccgcaggcacaggtgagccaagccaggctcacccacagcgctgggtctgttgaccccagtcctctataggtgtaagcactaggctgcttttctcctcaacaccgcacctcattctcatactaagattacctgaggtcaggagtttgagaccagcctggccaacatggcaaaacctcatctctactaaaaatacaaaaattagccaggcatggtggcaggcgcctgtaatcccagctacttgggaggctgaggcagaagaattacttgaacccagtaggcagacgtcgtagtgagcagagattgtgccactgcactccagcctgggtgacaagagcaagactctatctcaaaataaacaaataaataaaataaaataacaaaagacagttcccagaagaagggaactgagctatgagacatcctttgaatgcatcacttgacaaagggttgagaacacccacctcatgctggagaagttggcagaatgcaggtgatataaaggcatggaggggcagggtgcggtggctcatgcctgtaatcccagcattctgggaggctgaggcaggcggaacacctgaggtcaggagttcgagaccagcctggccagcatggcgaaaccccatttctactaaaaatacaaaaattagccaggtgtggtggcgggtgcctgtaatcccagctactcaggaggctgaggcaggagaattgcttgaaaccaggaggtggaggttgcagtgagccgagaccatgccactgcgctccagcctgtgcaacaagagcaaaactccatctcataaataaataaataaataaataaataaataaataaataaaggcacggagagtaatacgcactgataaggtacacctaatacaagaaaaagaagcctacagtttcactatttgggaaaagttattctgctcttcatgacagtgttgaaagaaacagttatgcactgccatcccaggggccacttgtctggaaaagatcgtcagccacaggattcaccatgtacatcagccatcccagactgaggtctgaaccaccgagcaagtttttttttttttttttgagatgcagtctggcctcgatctcctgaccttgtgatccacccgctttggcctcccgaagtgctgggattacaggcgtgagccaccgcgcccggccggagcaagtttcttaatgggaagttacaccagagctggagactggtctggcccttgcgagggatgacctgtagattctcttcagtggggggtcccctggtgccaccgggtggggccaaggctccgtctggtcagccctggaggagacatacctgcggctctctgaaaggcatctatggcactctccagcccagcctgcgtctgccgatcacaccgggtcccaatctgggtgtagagggccccagtgttgaacaggacactggccttctccagcagcaggttctgctggctgaccggaaccccggtgagagagtcatacctatgtgaaagaaatgcattccgagaatacagattacttggctagttaatgctacaagtggaaaaaattctttttttttttttttttaagagtcaatatctcactctgttgcccaggctggagtgcagtggtgtgatcatagcttactgcagccttcaactttagggctcagttgatcctcccacctcagcctcatgagaatagctggcattactggtgcatgccaccatacctgcctttttttttttttttaatttttgtagagatggggtctatgttacccaaactgctgtcaaactcctgggttggctgggtgcggtggctcacgcctgtaatgccagcactttgggaggccgaggcaggtggatcacctgaggtcaggagtttgagaccagcgtggccaacatggtgaaacccagtctccaccaaaaatacaaaaattagccaggcatggtggcgggcgcctgtaatctcagctactcaggaggctgaggcggaagaatcacttgaacccgagaggcggaggttgcagtgagctgagatcgcaccactgtgctccagcctgggcgacaacaacaacaacaaactcatttcttcagtaaaagtcaagaatgcatgtgcactgaggcttttgtttccaagcaagatgacaggactaatcacactgaccgccacagccacacacaaaaatatctgacggggtaactggataaacacaccatgggacatccagacaatggaatattactcagcactaaaaatggagaaatgaaccagcaagccatgaaaagatgcagaggaaacattactaagtgaaagagccaacctgaacattgctacctactgtatacgctgtgtgattccaacattctgaaaagccaaaaccctggagacagaagaaagatcaggggttgccaggacttagggggagggagggagggggagcacaaaggatttttccagtagtgaaactcttctgtatgacactgcaaaggtggatcactgtcattctatgttggccaaaagccacagaatacacaagtgcaagaatgaaccctaatggaaactatggactctgggtgataatgatgtgtcaggtaagttcttcaattataaaaaaaaaaaatgggctgggagcggtggctcatgccagtaatcccagcactttgggaggccaaggcggtatggcttctcctaaatgaaatatggcaattactaacccctcataattctttctgaaatctaaaaactcaggatttgttttaatttgttttactttttattttttcagacaaagtctcactctgttgcctaggctggagtgcggtggcatgatcatgactcactgcagcctcaacctcctgggcttaagagatcctcccatctgagcctcccaagtaggtgggactacaggcatgcaccacccatgaccggcaaattttctctaattgttttgtagagatagggtctcactgtgttgcctagactggtctcaagctcctgggctcaagcgatccacccaccttggcctcccaacctgctgggattacagatatgagccaccacacccagcctaggacttgttttatttttattttttttattttttattttttgagacagagttttgctctttcgcccaggctagactgcagtggcgccatctcagctcactgcagcctccacttcccggattcaagtaattctcctgcctcaacctcccaagtagctgggattacaggcacccaccaccatgcccagctaatttttgtatttttagtagagacagggtttcgccgtgttggtcaggatggtcttgaactcctgacctcaggtgatccacccacctcggcctcccaaaatgctaggattacaggcgtgagccaccgcacctggccctaggacttgttttaaagtttactcatgaaccagggggtgtgcagacagcttctccctaattcatgactaaggagaaaccacctttcgccttttcggccatgcagacagcctggtgcattgttaggaaaagtcatccccctttcctttgctttccatgaggaaggcattagtagccacccatcagctgtagaaacattgaattctgatatgcccctgatcttctaggatgtgttctcctttcactgacactcctaacgacactcagagaaggggtgcagcatctccaaagtacttttttttaggttgtttttttttttttttgacacagagtctcactctgtcacccaggctggagtgcagtggtgtgatcttggctcattgcaacctctgcctcccgggttcaggcgattctcctgtctcagcctcccaagtagctgcgactacaaggcacgcgcaactatgccttgctaatttttgtactttttactagaagcagggtttcaccatattggacaggctggtctcgaactcctgacctcgtgatctgcctgccttggcctcccaaagtgctgggattacaggtgtgaaccaccacgcccagcctttttttttcttgtttgaaaaagggtttcactcctatcatccaggctggagtacggtggtgtgatctcggttcactgcaacctccgcctcccgggctcaagtgattctcctgcctcagcctcacaagtagctgggactaacaggtgcataccatcatacccagcaaatttttgtattgtttgtagatatggggttttgccacattgtccaggctggtctcaaactcctgggctcaagtgatctgcctgcctcggcctcccaaagtgttggcattacaggtgtgagccactgtacccggcctcccaagtatttaaactatactaacctttgaaaataccaattgggtctacggccataccaccctgacgtgcctgatcttgtctgaaaataccaattgtggagaagaatcaaatgctctacttcctttttttaaatctgatctaagctgagtgagtagctcatgcctatagtcccagctattcaggaggctgaagcagaaatatcacctgagcctaggaattcaagactagcctgggcaacacagtgagaccccatttcaaaagaaacctgatctatttctgtttggtgcttttgcctcactggataagacctgattttctctctctctctcactcacacatacacatgcatgcccctgtccaatctgagataagaatctcgcttctggctaattccacttcagagcccccgtgcttccccagtgatacaacgagcaagaaaaatgtctcttctccttggctcgcttgttctgagaagcaagaggccacagtctgttggagccatctcccctcggatcaccttcataaataaataccaatgtattgacatcttttgagacttccccagataaatgcaagataggaaagggggctgaggtgcacaggggcacccgcagaggggcgtctgtgatgctgaggctccaaaattgtggctgccataacacgtgaagcgccagcgcagacctcaagcacctaccaggtgaacaggagtcccatctgccgtgtgggcgggaagaatcgactctcgacaaagcccagctggatgaagtatgtcatcagcagttccaccccggcctcatcccggctaggcgtccgacaagcctgcaaggaaaagaacccaagagggcatgagcagaggaggacacagctgatggcccttcccagaaggtgccctgcacataccagcaggtgcctgtaactatttctgcagtatgatgacctcgctactggcatcgtaaactctgggaggggtggaaagaacctgggaggaagtcagaaatcctggaatccagtcccagccctgaggcagggctctccccttctatggttttccttctttttttttttttttttttgagacagagtcttgctgtcacccacccaagctggagtgcagtggtgcgatcttggctcactgtaacttccacctaccaggttcaagtgattctcctgcctcagcctcccgagtagctgggattacaggcgtgtagcaccatgcctggcttgtttttgtatttttagtagaaacagggttttgccatgttggccagtctggtctcaaacttctgacctcaggtgttccacccgcttcagcctcccaaagtgctggaattaccagcatgcaccaccacgcccagctaatttttgtatttttagtagagacagggtttcaccatgttggccaggatggtctggaactcctgacctcaggtgatccgcccacctccacaccccaaagtgctgggattacacaggcatgaaccaccgcgcctggcctccttctacagttttcttatgcagcaagtggaatggatgattccagcaccccccaaccatcacctctatccacccgcgattctgttaagaccacaagcgtgcaataatggggttccctgaagactcggaaaagccaccctcccctctctgctgcacacaaaaacttacttgtctcagatccataagatctgcaatttcatcttcatataaatagccatcttcactgtaatgttccaggataaaatccttaaagaaaaatgaggtcagatgttataaagtgtggctgaaaaccatatgtgtgcataatagtaatatgtcaattgtgaacccatttttaaaaaggcagaataaagaaaaacttatagtgattttcaaagtgggggaatttattttcttaatttatgtagttttttttaatacggagtctctctttgtagcccaggctggagtgcagtggcacaatctcggctcactgcaacctctgcctcccgggttcacgcaattctccttcctcagcctctcaaggagctgggattacaggcgcccaccacaatgtctggctaattgttgtatttttggtagagacagagtttcaccatgttggtcaggctggtctcaaacttctgacctcaggtgatccccccacctcgccctcccaaagtgctgggattacagatgtcagccaccgtgcccggccatagtttttttttaaaaaaacaaaaacaaaaaacaaaaaacagagtttcactcctgttgcccaggctagagtgcaatcttgcgatctcggctcactgcaacctccacctcccaggctcaagtgattctcgtgcctcagcctcccaagtagctgggattacaggcatgtgccaccatgcgcagctaatttttgtatttttagtagagatggggtttcaccacattgcccaggctggtctcaaactcctgggctcaagcaatccatctgcctcagcctcccaaagtgctgggattacaggtgtgagccactgcaacacacgcctatgtttttaaatgttgtgctgcttcagtaaaagtgagagttgaagtaaattttttgcttaaaaatgtctttgtgtctgcgcatcgtggctcacgtctgtaatcccagcactttgtgaagaccaggcaggtaaatcacttgagcccaggagttcgagaccagtctatggcctatacattcaactatactgcaaacactgcagctattcaggggctcagacttgcaattctgggcctccctcaggacccggacaagtttcccagcacagatcctgagggtaggactgtcaataacagtctccagatacaggtttcctttgccaagaagacccttaaccatgttataaaggcattttattttattttactttattttattttattttattttatctttgaggcagggtctcactttgttgcctcggctggagtgcagtggtgcgatcgcggctcactgcagcctcaacttctccaggctgaagcaatcctcctacttcagcctcccaagtagctgggaccacaggcacgtgccacaagctaatttcatttttgtgttttttaatagagatggggttttgccctgtcgccccacccccgcccctacaagtgctggctcccccaagctgcaagaaaggtgatcacatagatcgctcaattatgtcttcccaagtgactgtgagtaacctctttacacaacttttacattaaagctcctcctgtttttgtgtgttcaacatacagacacacaaacagacaaacacttgtcttacaaaaatggatttgtactaaatacacaactttgctgtgccttctttttctttttttaagagatgagggtcttgctctgtcgtccagggtggagtgcaatggtgcaatcatagctcactgcagccttgaactcccgggctcaagtcatcctcccacttcagcctctccaggagaggggactataggtgtgcaccaccacactcagctaatattgttatttttcataaagacagagtcttcctatgttgcctaggctggtctcggactcctggcctcaggtgatcctcccacctcagcttcccaaagtgttgggattacaggcatgagccactgcacccagctgactatgcctcttttctttaaacttggccatgggctgggtatggtggctcacacctgtaatcccagtgctttgggaggctgaggtaggtagatcacttgaggtcaggtgttccagaccagcctggccaacatggtgaaaccccaactctattaaaaatttaaaaaataaaaaaataaaatagctgggcatggtggttaaaaggggtcaggtgtagtaactcatgcctgtgatcccagcactttgggaggccaaggtgggagaatcacttgagaccaggagtttgagaccagcatggacaacacagtgaaaccccatctctacaaataataaaaaattagccaggcgtgctgaggcaggaggaggatcacttgagcccaggaggttgaggctgcagtgagccatgatcacatcactgcactccaatcttatgaaagtcaaagaggattttgattaaattttatatgtgatcctgaatttgaaacttagtaaactagggtagattaacgtacttagtgggataaaaaaattatctaactggccaggcacggtggctcacacctgtaatctcagcactttgggaggccaaggcaggtggatcacttgaggccaagagttcaagaccagcctggccagcgtggtgaaaccctgtctctactaaaaatacaaaaattaaccaggcatgctggcaggtgcctgtaatcccagctactcaggaggctgaggcaggagaatagcttgagcccaggaggcagaggttgcagtgagctgagattgagccattgcactccagcttggatgacagagcgagacttcgcctcaaaaaaaaaaaaatcctaactgaaacccactgtgaacattagggacaaaatgagaatttctaccatcactgttattacttagcctaattccaaacattctctagcccacacattaagaaaaataagagacataaaatattagaaagaaacaatcaaaataattttttgcaacgtaacagcatgtttataaaacccaatagcatcaactgaaacattactaaattaataagaattcaataaagtggcaaagaatttaacacatgaaagtcaatagtaaaaaagaaaagtcaatattcttcctttcttatacaagcaataaccaattagaaaaacttagcagacagccaggtgtggtggctcacatctgtaatcccagcagttttcaaggctgaggtgggcggatcagttgaggtcaggagtttgagaccagcctggccaacaaggtgaaaccctgtctctactaaaaatacaaaaaattagctgggtatagtggcaggtgcctgtaatcccagctacccaggaggctgaggtaggagaatcacttggacctggggggcagaggttgcagtgagccaagattgtaccactgtactccagcctgggcaacatagtgagactctgtttcaaaaacaaacaaacaaacaaacaaaacctaacagagaaataatacctttcacaatagcaacaaaagtacatttctagggataaaattaatataattaagcagaaaactgttaaactttactgaagaacagatgttatttcattttctttcattgattcgaaattttttttttttttaaatgagacaagttatcattctgttttccaggatggagtgcaggggctcaatcatagctgactgcagcctcgacctcttgggctcaagcaatccacctcaacctcccaagtagctgggactaaaggtgtgagccactgtgcctggccctatttctttaaaataaaacaaaatcggccagctgctgtggctcacgcctgtaatcccaacactttgggaagccaaggagggtggatcacttgaggtcaggagttcgagaacagcctggacaacatggtgaaaccctgtctctactaaaaatataaaaattagctgggtgtggtggtgggtgcctgtaatcctaggtactcaggaggctgaagcaggagaatcgcttgaacctgggaggcagaggttgcagtgagccaagattgcgccactgcactccagcctgggcaacagagtgagactccctctctaaataaatagatacataaaataaaataaaacaaaatcacactgtgaagcttcactgattataaaacatcacacggacacacaagtcagatttgaaatggaactgccgtaattcagtctgctgaaccacttctgcagtacctgtgtttctatcaaatatggaagggaaaaaatacaacagaaagtccgtcaaacgttctcattttcatatgactgacatttgtagagtctcttttaggctaaaatgacatggttggaagcctgtgccgaatggcagttggccatgtccacaacatgtgaatattttcatttgctttaatgtggaattcagaacatgacccagttgaatccttaaaaatgcctataaaattcctaagtttctccaagagactcttcctttaaaatgcttgcattcttggccggatgcagtggctcacacctgtaatcccagcactttgggaggctgaggcgggtggatcatctgaggtcatgagttcaagaccagcctggccaacatggtgaaaccatgtctctactaataaaaattagccaggtgtggtggcacatgcctgtaatcccagctacttgggagaatgaagcaggagaaccgcttgaacccaggaggcagaggttgcagtgagctgagatcgtgccattggactccagcctgcgcaacaagagtgaaactccatctcaaaaaaaaaaatgcttacattcttgtagcacagcaccaagcaacagacaaattaaatcgtaaagaaacttctacaacagcagcaacagacatttctagacatgtggattgttttgagtcccacagaccagtggcaagtcacatctatttttgcatttatatatatacacattacacatatattttaaataaaaatagagatgcggctgggtgtggtggctcacatctataatctcagcacttttactggaggtggaagcaggaagatcacttggggccaggagagttcaagaccagcctgggcatcatagtgaggagaccccatctcttaaaaaaaaaaaaaaaaaaaaaagagagagagagatgactggccatggtggttgacgcctgtaatcccagcactttggaaggccgaggtgggcggatcacctgaggtcaggagttcgagatcagcctggccaacatggtgaaaccctgtctctactaaaaatacaaaaattagcctggcacggtggctcatgcctctaatcccagcactttgagagcctgaggcaggtgtatcatgaggtcaggagttcaagatcagcctggccaggatggtgaaaccccgtctctactaaaaatacaaaaattagccgggcgtggtagtgggtgcctgaaaccccagctactcaggaggctgaggcagagaattgcttgaacccaggaggtggaggttgcagtgagccgagatcacgccactgcactctagcctgggcaacagagcgaggcttcatctcaaaaatatatatatacacacacaaaaattagttggccatagtggtgcatgcctgtagtcccagctactcaggaggctgaggaaggagaatcgcttgaacccagaaggtggaggttgcagtgagctgagatcgcaccattgcactccagcctgggcaacagagtgagactgtgtctcaaaaaaaaaagagagagagagagagagacaaggtctcattctgttgcccaggctggtctcaaactcctggcctcaagctgtcctcttgcctcagcctcccaaagtgctaagattataggcatgagccattgcatctgggcataagtctcaggtaaaagttcaggcaggctgtggcagtgtggcataaagctgcaattcccgaattgttttcattgctttctacccagaatacaaactttccagtaaacttgagtcctgaaacattcagaataccaacttcccttctccaattccaaaataaaccccaaactcacaggatttaaacaaggcagcagtcaaaaaggcctctatttatgtcaaacaactcactgtctctgagaatgaacgtcaagtgcttccaaagtattaaccaattgcttttaaaagtagtagttggccgggagcggcggctcacacctgtaatcccagcactttgggaggccgaggcgggtggatcgagtttgagaccagcctggccaacatagtgaaaccccatctctactaaaaatacaaattagctaggcatgatggcgggtgcctgtaatcccacctactcaggaggctgaagcaggagaatcacttgaacctgggaggcggaggttgcagtgagccgagatgccgtcattgccctccagcctgggcaacaagagcgaaactccagctcaaaaaaaaaaaaaaaagaaagaaagaaagaaaaaaatagtaatagtcaaaatgtcataagatgttttcttttctaaactaaaagtagtccaagatgagccaattaagaggattatcatggaaagtaaaataagccaggcacagtggctcatgcctataatcccagcactttgggaggccaaggcaggaggactgcttgaacccaggagtttgagaccagcctgggcaacagtgggaaactctgtctttacgaaaaatacaaaaattagccaggcatggtggctcacgcctgtaatcccagcactttggaaggccaagacaggtggatcacctgtggtcaggagttcgagacccacctgaccaacatggagaaaccccgtctctgctaaaaatacataattagccaggcatggtggcacatgcctgtaatcccagctactcgtaaggctgaggcaggagaatcgcttgaacctgggaggtgaaggttgcggtgagccgagatcacgccattgcactctagcctgggcaacgagagctaaattccatctcaataaaaaagaaagaaagaaagaaaaatgcaacaattagccaggcacggtggcacacgcctatagtaccagctactcaggaggctgaagtgggaggatcacctgagcccaggaggcaggggttgcagtgagccgagatcatgccactgcatgccagcctgggtgaaaaagtgagactctgtctcaaaataataaagaaaaagaaaaaaaaaaagaacgtaaaatatttcttcaaagcaattttcatgatactaggattaattcctataaccaatgcctgggctgcatggcgcaaacttgggccaccctgcacctcatcccctttcccctccttgatggaatttggaggtgactggttaaaaactcaaactgatggagttgaagagggaaggaagaggagggtattccaggcacaggacggtctcccagccccagcatcggggcatggtctctcctgtgttctccactgaagcacctcttccacttcccacttgaaacccccactgacccaaaggccccgcaggcagggcttgtggcatctctggcacccagcacagtgccaggcacaggtgggcttatgaggatctgcaaatgggagaggagtccagatacccaggaatgtggctgggggacacacaagcaaagactctggttattcaaatatttaaggggagtgaattgacatctttgatttcctttgaaattgcattacaaataagacagactgataatagccattactttcgttctcttttttttttttttttgagacacagtttcactgctgcccaggctggagtgcagtggcacaatctcagctcactgcatcctctgcctcctgggttcaagcgactctctcgtgcctcagcctctcgagtaactaggattacaggcatatgccactatgcccagctaatttttttttttttttttgaaatgggatctcactctgtcgcccaggctggagggcagtggcgtgatctcggctccctgcaacctccacctccaccttccaggttcgaacgactcacctgcctcagcctcccaagtaactgggattacaggtgtgcaccaccacgtccagctaatttctgtacatttagtagagacaggggttttaccattttagccaggctggtcttcaactcctgagctcaagtgatccgcctgcttcagcctcccaaagtgctgggattacaggcgtgagccactgtgcccggcctttagccattactttcaatggaaaaactgcaattaccttcaaaccaacctaacagacacaagaatgcgcagatggacaaatatgtcaggaagcaatgctggcagtatgttcttggaagaattgagtacacaggagtttgctataaaattcttaaaattttttgaaaagtttggaaattttcataataaaatgttagagaaaaaactttagctattcttctaaagacataacctaaactggttatatgatttaagaaaaaaatacactattaataaaagaggatataagttttaaatttcaaagcatgtccactacagaccctctttgacttggcctcttgggaaaggccctcctgggtttccaacctgccttgtccaagacccaggaggagcttcagaagccatcaaaggcaacaacaaaaatatggcaggaataaacatataaattatgcatgtagctggctgagaagggcctcagggtcactctgtagatatcaactgactctgcctgttgagcctaaggccattgcaagggatacatattttctctatctccattttttttcttttttttggagacagggtctcattctgttgcccagcctggagtgcagttgtatgatcacaactcactgcagcctccagttcctgggctcaagcgatcctcttgcctcagcctcccaagtaactgggactacaggcatgcgccactgcaaatggcctatttccattttaaacactgagtctggtgcccatggctttgagatttaccttgaggacgactgcaaagtcgacgtctttcgtttccttcaggccaagaggaatcaggggaatcgtaaatgcctccctatgaggaacacaacaaggtatgtatgaacacccccaaccggacccctgtgcaccccacggccttgccctcagcagcccaagctcaggtgtgtgccccctccttaccccatcctgtactcacctggctgacaggctcattttccataaggatgactctggtcatgccccaccctctgctctaaaactgaccccgctccctaagactgctggaccacccctcctaacacatcaggcccctggcatcttgacactgatttatcttccagtttcaatgcctcaatggttccttttttattttattattattttttttagagactcttgttctgtcgcccaggctggagtgcaatggcgcaatctcagctcactgtagcctctgcctctcgggttcaagcaattctcctgcctcagccccccgagtaactgggattacaggcacacgacaccacacccagctaatttttgtatatttttttagtagcaatggggtttcgccatgttgaccacgttggctaggctggtcttctgacctcaagcgatccgcccaccttggcctcccaatgtgctgggatgacgggcgtgagcctctgagcccagctcagtctcaatgcttctttcggcagctgtgctgagagtctattgtgtgccagggtctgtgcctggtgcacttgctgctcccacctgggtgcaccaccctgctgcctcctttgtcagctcctcacccccacctcctctgcccccctcagcgggccccacagctgtggaagctctccaataccctcacatttgcaactctgggttcataggggcctcttctttgggaagtgtctaggcgtcccaccaccggcacaggagatgccgtcagggcagaagccccatctgacaccgaaatgcacctgcctcccagcccagggtcagacaccctccacctcctctcccccagctgaccactccgtaaccacaggtcgcctggggagtgctccctgagcctacattcctaggggcagggccagaaggaagtgaatgaagctcaggctgtgttttgcaaacaaggatttagctccctgacctgtaacaggagacctccttgggctgctcagcccagccccacaagaaggccaggaaggctgggcagggcgaggggacaatgcagctgtaagctgaacctggctctgcagtgcagctgtgctacagccaggtgagtcccatccgggggcatggaaagccggatcctgctgaaggctcctccaggctactcagggcaggaagccaggtttgcagctgtccaggcaatgagaagaggaggagcgagtgtcctgagtcccagctccagggtaccccagccccaatgtggcaatgacagcgccctctaggtgccttctggcctccctgagttttcccatctgcaccatgaggttatttctttcccacctacctcctagaagactgtaaagatcaaccatgctaagaaagaaacagtctactttgaaaacacagtagtgcaggccaggtgcagtggctcacgcccataatcccatcactttaggaggctgaaatgggtagatcacctgaggtcaggagttcaagaccagcctggccaacatggtaaaaccccgtctctactaaaaatacaaaaactacctgggcatggtgatgtgtgcctgtaatcccagctactcaggaggctgaggcaggagaatcacttcaaccaggaggtggaggtagcagtgagccaagatcacgccactgcactccaggcctgggcaaaagagcgagactccatctcaggaaaaaaaaaaaaaaagaaaaaaaaaagatcaaccatgctaagaaagaaacaatctactttgaaaacagggccaggcatggtggctcacacctgtaatcccagctctttgggaggccgaggcaggcggatcacgaggtcaggagatcgagaccatcctggctaacggtgaaaccccgtctctactaaaaatacaaaaaattagccaggcaaggtggcgggcgcctttagtcccagctactcgggaggctgaggcaggagaatggtgtgaacccgggaggcagagcttgcagtgagccgagatcgtgccactgcactccagcctgggcgacacagtgagactccatctcaaaaaaaaaaaaaaagaaaaaaaagaaaacagaagagcgcaggacccaaatgcatggtgccgtgttgaatctgcacagctctccctcttcccaatgacacagggcagtgactggccactctagagcccagggaccaatccagagaccttcggttcactctgtgggaagccctgtgttgcacgtccctgctcttcggcatggcaaatgcgagtgtggaacagccgacatttattcccaaaccttggccccatctcgcctcctccagaacctgaaccttttggacaaacactggaattgaacaccagagcataggctgggagaaccttccattagctgtcgcactgactgggcgttcaaaactgcacaggaggccgggtgtggtggctcatgactaatcccagcactttgggaggctgaggtgggtggatcacgaggtcaggagttcgagaccagcctggccaacatggtgaaaccccgtctctactaaaaatacaaaaaattagctgggcatggtggcatgcgcctgtagtcccagctactcaggaggctgaggcaggaggattgcttgaacctgggaggcggaggttgcggtgagccgagatcatgccactacactccagcctgggtgacagagagagactccatctcaaaaaaagataaaacaaacaaacaataaaaaccgtacaggagcccacaggtaagccaggcatgtggtgtcacaaagggaagagccagcgaggtttcacacactgacgcctcccctccagctctgaaaccaccccggtgccctgcagaggaccagcaccaggaaacacacattccataggtgactcaaggttcccaaatcccgggagctattttccgactgagtttcccctggggcccacctactttttgagaagtctcatgcccacactgaagaagcacgtaaacccttctctgaactgtctcaaagttatttctccttaaaaagaagcatttcgcttagggttctgttttgtttttgtgttttttgagacaggacttttttctgttgccattactacagtctcgacctccctggctcaagtgatcttcccacctcagccttctgagtagctgagactacaggtgtgcaccaccatgcccggctaattttcctattttttgtagagatggggtttcactatgttgcccaggctggccttgaactcctgggctcaagcgatcccccacctcagcctcctgaagagccgggattacaggcataaggcaagaggggcatttctttcatagttagatctccatttttggagatgtattgcaattctgagggatggtgttgttggctttcacgttgaagaaatcgattccaaaattgagttatggagaatgatacaatagagtgccttcaaaattgacctaggggccaggcacagtggctcacatctgtaatcccagcactttgggaggccaaggcgggcagattacttgagaccaggagttcaagaccaacctgggcaacatgatgaaaccctgtctctacttaaaaaaaaaaaaaaaaaacaattagccaagtgtgatggtgcgtgcctgtaatcccagctactcaggtggctgaggcacaagaatcgcttgaacccaggaggtggagattgcagtgagctgagatcgctccactgcactccaacctgggtaagagagggagactctgtgtcaaaaaaaaaaaaggaaatacaaccttaaaaggagactggtgtgttactttaatttggatttttctgtttcagtttgtccctccagctaggaaacagactgcagtccaacgtaagtacagtgcacagaatctctgtgtgtgcatagtggcctccccttacagggtcaattttggcctttggccttaatcccaaagtatttgtgtatgctttttgttccttggcaaataaatgaggaaataattagccaacattggaaaggtattgtcctaacaatgtccctttaatatttcttaggaaagttatggtgacccactaaaatatccttgcttaatgtctgttcagttgaatttaataacatatcttgctaatgtttgcgtgtctatgaaatgtgactacgcggaattactgaaaattaactataaaatccaaggcatctaacttttaaacttatcttggctcatcacgtatatttacactagattttatactgtgttcatttgtttttttttttttttgtctgtttgttttgagacagagtcttgctctgtcagccgggctggagtacagtagtgtgatctcggctcactgaaacgtccaactcccgggttcaagcaattctgcctcagcctctgagaagccaggattacaagtgtgcaccaccacgcctggctatttttttttttatttttagcagagacggggtttcaccatgttggccagactgacctcaggtgatccacccgcctcagcctcccaaagtgttgggattacgggagtgagccaccgtgcccggcctcacaaatgcctttttgtccaacactgcaggtatttcccaacaaatgggctcatcccttccagtctagcacctcactcaaccccaaacctgatggttctctcacttccgaaagtgggggctgccacaccccagtctagaacgctatctgacctctttgtgcagcaccctggatgtacgaaggatctctggctcagaggcttttggaaggtgtgctgctcccacttactctgtgttctgatagacgcccaccgagatgttcagcccctccagctcttccttgagcatctgcaggtctgagttgacgaagctcagctccagccgcacttgctcccgcacctttgagtttgtggccactctgttcaaagagaagagggagagaagtgccctcagccaggtatcctggcttctaggtgagcagacccaatccccagtccctgcagggaggatcagggcacagcttgcagaggagggccaggagtgtcggttaaggtatcccagggacacagggcacctacccagcttgcagcacacctgccagtacgtggagctggggacacaggcaatgacactgtgagctgcagacatgaactctatgacatcctgcaaacactcagtcttgagaagagaaaacaaaactgctcccagccatgccctaaaataccataagatacccacttgaaaagaaatgaatgattccagccgggcatggtggcttacgtctgtaatcccagcactctgggaggccgaggcaggtggatcagctgaggtcaggagttcgagaccagcctggccaacatatagtgaaactctgtctctactaaaaaatacaaaaactagctgggtgtggtggtgcatgcctgtagtcccagctatgcagaaggctgaggcttgaacctgggagataggggttgcagtgagctgagattatgccactgcactccagcctggacaacagagcaaggctccctctcaaaaaaaaaaaaaaaaaaaaaaagaaatgaatgattcctttcggtgggagaaatcacagtacataaataaataaacataaaatttgttttaaaaaaagaaagaaatggatgattatagctgggcatggtggtgcatgcctatagtcccaggcaggaggattgcttgagtccaggaggttgatactgcagtgagctatgatcacaccaccgcaatccagcctgggtgacagagcaagacactgtctctaaaagctaaaataagataaaatgaaataaaatataaaaatatataagatagaaagtaaaataaaataaatgaatgagaaaatgaagggagaggtaatgcttcccaattcattctgtaagactagtattagcaatccaagcctagcaacatataaataggattgtacaccataactaagtgggatttatcccaggaatgcaaggttggtttaacatctgaacatcaatataatataatatattaacagaataaaggacaaaaaaacacatggtgacttcaacagatattgaaaacactgtgacaaaatccatcacagattcataataaaaattctcaacaaagtaggaataaaagagaatttatgaaatctgataaaagacacctacaaaaacccacagttaacatcacacttagtggtgaatgactgctttcctcttctcaccaggaacaaggcaaagatgcccacttttgctatttctaatcaatgaggcaaataaagaaattaaaggcatccagattagaaaggaagaaataaaactgtctttatttacagatggcactatcttatatatagaaaatcctaaggcatccataaaacaaatattagtactaataaatttagcaaggtcacagggcataatcaatatacaaaaatcaattctttttttttttttttctctagacagggtatcagtctgtcacctaggctggagtgcaatgtcaccattatggcttactacagcctcaacctcccaggctgaagccatcctccagcctcagcctcccaaggagctgggactacaagtgcacaccaccacgctggctaatttttgtgtttctttgtagagatggagtctcactatgttgcccaggctggcccagaaatcctgggctcaagcaatcttcctgcctcagcctccgaaagtgctgagattacaggcatgagccactgtgcctggccaattctatttctatatactagcaatgaacaatcttaaaattgagaaaaccattccattcacaatagcatcaaaaagaataaaatactcaggaataaacaaaagaatcacaagacatgtaaactgaaaactacaaaacaatgctgagatatattaaaagaagagctattctatgtttatggatgggaaggctcattattgtcaagatatcaagcctccttagttggtacattcattcaatgcaacctcaatcaaaatcccactaacctttttaatagaaatcggcaagctgatcctaaaattcatatggaaatgcaaaaaaaacctacaataggcaaaataattttgaaaaataagaacagagttggaagacaattgattttaaaatttactaaaaagctgggctgggcatggtggctcacgtctgtaatcctagcattttgggaggttgaggtgggtagatcacctgaggtcaggagttcaagaccagcctggtcaacacggtgaaaccccatctctactaaaaatacaaaaaattagctgggagtggtggcggacacctataatcccagctactcgggagcctgatgcaggagaatcacttgaacccggaaggcagaggttgcagtgagccaagatcgcgccaccgcactccagcctgggcaacaagagcaaaactccatccccaaaaaaaaaattaaaaataaacttactaagaagccatagtcatcaagatagcatggtactgacataaagataggcaatgaatcagaataaaagtccaggaataggccgggtgtggtagctcacgcctgtaatcccagcactttgggaggccgagacggacggatcacgaggtcaggagatcgagaccatcctggctgacatagtgaaaccctgtctctactaaaaatgcaaaaaattagctgggcatggtggtgggcacctgtagtcccagctactcggggggctgaggcaggagaatggcgtgaacccaggaggcggagcttgcagtgagctgagatagcaccactgcactccagcctgggcgacagagcgagactctatctcagaaaaaaaaaaaaaaaaaagaagaagagtccaggaataaatgtttacatttatgtagtaaatctttacaattgattttgaacaaaagtgccaaatcaattcaatgtggaaaagattattgtttcaacaaatagcgctaaagcaggttgacatccataggtacgtcagggtccctaaaaccacccccaagttcagtgttaatctaggaggacttgcaaaagccatggctatggtttacgacagcaaaagacacaaagcataatgagcaaagggaaaggcacatggggtgaaattgggaggaggcccggcccaggcttctaggggtcctctcccagtggaatcccacagaccgtgcttaactcccccagcaaagagttgtgacaacacacgtaaaatgccatctaccagggaagctcagagactccgtgtccagggtttttactgggggctgatagcataggcacctctgcctagcatgctccaaaattctggattcccagaaggaaggcaagtggttccacataaaccacaccatttgtacaaacagttcaggcacagtgagtcaatcttatcagtctgggaatggtgagaacactcgtaaaatcgaagtctctgccctcaccacgtgtgacaacactcttcctcttgtggccctggaagtccacacacacgcacatttggactgccccagaaaataagatactggaggctcagcttgatgaatttcatcaatttagagatgtttgtgtgtgtatggctatggcaccagtaagaaatacattttaagccaggtgcagtggctcacatctgtaatcccagcactttgggaggccgaggcacgcggatcacttgaggccaagaattcgagatcagtctgggccacatggtaaaaccccgtctctattaaaaagacaaaaattagccaggcatagtggcacacgcctgtagtcccagctactcaggaggctgaggtatgagaatcgcttgaacccgggaggtggaggttgcagtgagctgagagcgcaccactgcacaccagcctgggtgacagagcaagactccatcacaaaaaaaagaaaaaagaaatacattttattttacaactcagtacatgcatgcacacacacagacacatgcccctgcaacaaaagtctcacagaagtcataggcgtgatccactccagcatagtctagtctactctaataacttctttttaaaacacaattatgtttgcaaccctccaattctctgattatctgacaccaactgggtatccaacaattcaattcgattctgaccccagctcccggcgtaagcacataccccacagagtaggggctcggtcccacaaggctgcccccattttagggaccagtcacacatcctgggagagagggggatacttgtgcttctgactgatgagctgtcaatcaaaggttcccactgccacctcctcaggtttggtaattcaccagaaagactcccagaacataggaaagcacctgatggaccagtactggtttatgttattcaattcaggaacagccaattggaagaggtgtacacggcaagttatggtgggagaggggcagggcttccatgctcactccagacacctcaatgtgttcaccaacccagaagctccctgaacctcatcgttcagaattttattctattctattctttctattctattctattctattctattctattctattctattctactctattctattctattatttttgggagagggtcttgttttgtcacccaggctggagtgcagtggcacatcatggcttactgcagccttgccctccagggctcaaatgatcctcccacctcagactcccaagtagctgggactacaggcatgcaccaccacacccggctaatttttgtattttttcaccatgttgcccagtccagtctccaactcctgggctcaagcaatccgcctgcctcaggcttccaaagtgctgggattacaggcgtgagccacgacgcccagccttattttatttttttgtatagatggtgtcttgctatattcccgaggctggtctccaactcctgggctcctgggcttgagtgatcctccctcaccctcctgagtagctggaactacagatatgcaccattgcgcctggctaacgtaggttttttgtgggtgtgtgtgagatggagtcgcccaggctggagtgcagtggcgtgatcttggctcactgcatgctctgcctcacgggttccagtgattctcctgcctcagcctcccgagtagctgggacagtgattctcctgcctcagcctcctgagtagctgggactacaggcgcccgccaccacgcccggctaatttattggatttttagtagagaggggtttcaccatgttagccaggatggtcttgatctcctgacctcgtgatccacctgtctcagcctcccaaagtgctgggattacaggcgtgagccaccgggccggtcttttttttttttttttttttttgaggcagagtctcactctttcccccgggctggaatgcagtggtgcgatctcagctcactgcaacctccacctcccaggttcaagcaattctcctgcctcaggctcccgagtagctgggattacaggagcctgtcaccatacccagctaatttttgtatttttagtagagacggggtttcaccatgttggcctggtctccacctcctgacctcaggtgatccacccacctcggcctcccgaagtgctgggattataggcgtgagccaccgtgaccagcctaatgcagggtttatggaggcttcattacgtatagatgattaaatcattggccactggtgactgagctcgatctccagcctctctcccttctccagaggtggtgtagggaggagctgaaatttccagccctctcaccatggcttgtgctttctggggatcagcatccattctaaagcctcccaccaagagtgatctcattagcatacaaaagatacttttatcactcaggagctctgtgccaggaacacaggaacaggacaaagaccaaatatttatcttttattatgccacagcaaagcactgaattgatgtcattacacaccacaggtcacaatctgcagcttgtaaaacctgtgctacaaagagcttattgagaaaacgactgatcctgtagctgataatgttcacaaggattggggtgggggcggaatcctcccatccctcagtatcaggaatgggttcatttcttcttacaaatgggattccttttgtctagtgaatataaaatgtgttccaaatatattcccttcctcctattgcctgccaggaagctcagagacaaaccatggctcacatttcacaaagtatagaggactttgtggcatgcactagccttacctccagctaaatctctcctttattcttctttctcttgccttcatatcttcattcactcctgatttaatcttacatgttgtatgaatatgttaaggtacttcaaatctactttaaaatgagggaagataaataattataattcaattataattcctagaggacaagccttctttctcttggtatttttttcctagaatctggcatagccctttccacatcatgggggcgctgaacaaattttagttcatggaagaacaaatgacagagtgaagactactccctctaggcagtgagggagctgattggtgcttagtaccacagtaggttcgacttaaatataaaaactaaggctgggcacagaggttcacacctgtaatcccagcactctgggaggccaaggtggacaggtcaactgaggtcaggaattcaagatcagcccggccaacatggtgaaaccccatctctactaaaaatacaaaaattatctgggcatgggggcacacgcctgtactctcagctactcgggaggctgaggcaggagaatcacttgaacctgggaagcgaagattgcagtgagcagtgatcacgccactgcactccagcctggcgacagagcgagtctccatctcaaaaaaaataaaaattaaaataggccgggcacagtggctcacacgtataatactagcactttgggaggccgaggtgggcaaatcacctgaggtcaggagttggagaccagcctgaccaacgtggagaaatctcgtctctactgaaaatacaaaattagccgggcatggtggcaggcacttgtaatcccactacttggaaggctgaggcaggagactcgcttgaacccgggaggcacaggttgcggtgagccgagatcgcgccattgcactccagcctgggcaacaagagcgaaactccgtctcaaaaaagaaaaaataaaataaaataaaaataaataaaaactgagaccctaagaaccccaccaaaatccctagagagcttccacgtaatgccaactctttatttttccacctttatatataaatttgccatgtctcccccctcccatcttggcaaaacatttttttttttaatagagtcaggggtctaaacatattgcccaggctggtctcaaactgctaagacaaagcaatcctcttgcctcatcctcccaaagtgctaggattataggtgtgagccatcgcgcccggcctggcaacaatttttgatttaagatttgccacaaggccaggcgcggtggctcacgcctgtaaccccagcactttgggaggccaaggtgggcggatcacgaggtctggagtttgagaccagactggccaacacagtgaaaccccgtctctactaaaaatacaaaagttggccgggcgcggtggctcatgcctataatcccagcactttgggaggccgaggtgggcagatcacgaggtcaggagatcaagaccatcctggctaacacagtgaaaccctgtctctactaaaaatacaaaaaaattagctgtgtgtggtggtgggcgcctatagtcccaactactcgggaggctgaggcagaagaatggcgtgaacctgggaggcagagcttacagtgaacagagatcctgctactgcactccaggctgggtgacagagcgagactccgtctcaaaaaaaaaaaaaaaaaatacaaaagttagctgggcatggtggcacacccctgtagtcccagctactcaggaggctgaggcaggagaatcgcttgaacctgggaggcggaggctgtggtgagccaagatcatcacaccactgcactccagcttgggcaatagagcaagactccatctcaaaaaaaaaaaaaaaaaaaaagatttacaagaaagccaggtgaagtgggtcattcctatgatcctagtgctttgagaggctgaggcaggaggactgcttgaggctaggagttcaagaccagccgaagcaacatagtgagaccctgtctctaaaacaaatatgttttttattttagtttttatttttgagatggagtatttttgagatggagtcttgctctgtcacccacgctggagtgcagtggtacgatcttggctcactgcaacctccaccttcaggttcaagtgattctcctgcctcagcctcccaagtagctggagttacagtgtgtgccaccacacccagctaattttttgtatttttactagagatggggtttcaccctgtaggccaggctagtcttgaactcctgacctcaagtgatccacctgcctctgcctcccaaagtgctgggattacaggcgtgagccaccacacccagccaatttttgtatttttagtaaagacaaggtgtcaccatgttgcccaggctggttttaaactcctggcctcaagtgattcttgaggatcagcctcccaaagtgctgggattacaggcttgagccaccacacctggcctaaaaattttttttaaatacatttccaacaaatcaatgagctgcccttaagatgtagacctctttaggttggtcactttgaaactgttggcagccaggtggggtctcagggttggtttctgtaatgctgacctttggtgcaaccatgattcagaaatcaaccctggcgtctgagcttcgttgctagcacaggtgtaggtcagaggcgttcgaaggacagcgactccattttgagtgagggctggaaaaagaggctgagacttgctgggctgcattctcagaaaattagccattcctagcctctaaatgtttacagtaaagggaacaaattaataatgttttctaaaacagacccagacctgggagtgtccagatatcccgatatctggagaacaaaggcattcctcaattttgctttaaagataataatatcgggccgggcgccatggctcacgcctataatcccagcactttgggaggccgaggtgggcagaccaccaggtcaggagatatagaccatcctggctaacacggtgaaaacctatctctactaaaaatacaaaaaaattagctgtgtgtggtggtgggcacctgtagtcccagctactcggcaagctgaggcaggagaatggcatgaacccgggaggcagagcttgcagtgagcagagatcaggccactgcactccagcctgggtgaaagagccagactccatctcaaaaaaaaaaaaattaaaaaaaaagataataatatcgattcctgcaaaatatagtaagaaagaaaattaatttttttttttttttttggtgacgggagtcttgctgtgttgcccaggctggagtgcagtggcacaatcttgggaggctgaggcaggaggattacttgaggccaggagttcaacaccagcctgggcaatatagggagacccccatctctacagaaaatttgaaaatgaaaattagctgggaatggtggtatacgtgtatagtcccagctgcttaggaggctaaggcaggaggatcacttgagcccaggagtttgggtctgcagtgggctagtgagaggtgacagcgtgctggcagtcctcacagccctcgcttgctcttgatgcctcctctgcctgggctcccactttggcgacacttgaggagcccttcagcccgccgctgcactgtgggagcccctttctgggctggccaaggcccgagccggctccctcagcttctggggaagtgtggagggagaggcgcgggcgggaaccagggctgcccgcggtgcttgcgggctagcgcgagttccaggtgggcgtgggctggacgggccccgcactaggagccgacgtccggcccgctggccccgggcagtgaggggcttagcacctgggccagcagctgctgtgctcaatttctcgcctggccttagctgccttcccgtggggcagggctcagcacctgtagcccgccatgcctgagcccccccgccaccctctgtgggctcctgtgtagcccgagcctccccgacgagcgccgccccctgctccacggcacccagtcctatcgaccgaccacccaagggctgacgagtgcgggcgcagggcgccggactggcaggcagctccacctgcggccctggtgtgggatccactgggtgaagccagctgggctcctgagtctggtggggacgtggagaacctttatgtctagctaagggattgtaaatacaccgatcggcactctgtatctagctcaaggtttgtaaacacaccaatcagcaccctgtgtctagctcagggtttgtgaatgcaccaatcaacactgtatctagctactctggtggtgacttggagaacctttgtgttgacaatctgtatctagctcatctggtggggacatggagaacctttgtgtctagctcagggactgtaaatgcaccaatcagcaccctgtcaaaacagaccactgggctctaccaatcagcaggatgtgggtggggccagttaagagaataaaagcaggctgcctgagccagcagtagcaacctgctctggtccctttccacactgtggaagctttgttctttcactctttgcaataaatcttgctgctgctcactctttgggtccacactgcctttatgagctgtaacactcactgcgaaggtctgcagcttcactcctgaagccagcgagaccacaaacccaccgggaggaaggaacaactccagacgaacaactccagacgtgccgccttaagagctgtaacactcaccgcagaggtctgcagcttcgctcctgagccagcgagaccacaaacccaccagaaggaagaaactccaaacacatccgaacatcagagggaacaaactccagacacgctgcatttaagcactgtaacaccgcgagggtccgtcgcttcattcttgaagtcagtgagaccaagaacccaccaattccggacacactaggattgcactgctacactcagtgtgggcaacagagtgagacctcctctcaaaaaataaataaataggcatggtggctcacagctgtcatcgcagcactctgggaggcctaggcacgaggattgcttgagccctggagtttgagaccagcctgagcatcatagggagacccagtctctacaaaaaaatttttaaaattagccgaatgccagtcaggtgtggtggctcatgtctgtaatcccagcacttttggaggccgagtgggcggatcacttgaggtcaggagtttgagaacagcctggacaacatggtgaaccccctctctattaaaaatacaaaaattagctgggcatgggggtgcgtgcctgtaatctcagctactagggaggctgaggcaggagaatcgcttgaacccaggaggcaacagagcgagactccatctcaaaaaaaaaaaaaaattagcctactatggtggtacacacctgtggaggctgaggcgggaggacagcttgagcccagaaggttgaggctgcagtgagctgtgatcataccactgaactccaggttgggcaacacagcaagacccagcctcaaaatgaataaatataaaaattttatttatttattatttatgtatttatttattttgagacggagtctcgctctgtcacccaggctggagtgcaatggcatgattgcagctcattacaacctccgtccccctggttcaagcaattctcctgcctcagcctcccaagtagctgggattacaggcgcacaccaccacacccagctaattttcttttctttttgttaagagacagggtctcactctgtcacccaggctggagtgcaatggcgcgatctcggctcactgcaacctcgaactcctgggctcaggggattctccagcctcagcctcccgagtagctgggattacagatgtgtgccaccacgcgtggctaatttttgtatttttagtagagacaaggtttaaccatgttggccaggctggcctcaaactcctgacctcaaatgatttgcccgcttcagcctcccaaagtgctgtgattacagacttgagccaccacgcctggtctaaaaagttttttttttaaagtaatacatgtgtatgttgcattctgtccccatttgttttagtgtaattatttttctcccaagtcttttaataaaactatccttccaggaataagcaccacattgacatagtgacttgccgcagcttcagcgaccttattagagcagcttagccttagtccatctgatcccaaatcccgctctgccagggtttcaggaggctggagcgaggactgtcccatcccctgctgaggtggctgatcagccagaccggcaggacatctgctcccagcctgtctctcaatggaggaaggtgggccttgatgttgatgtcagccccaaaggctatggagggcctgcaaaccccaccacagacacacaccagccctcccacaactgacggtgtgagctgtcatcaacctcaagtcactctcatgacagccaaggccacctcacgtcactcctgacccagaatttcatcacccccgtccagaggtcacaaactaaactgaaggcccgagggacttgttcacctggctctcaggatgttactatcccccctctgaaacgagtccccaaaacttaaaaattcaacaatcggccaggcacagtgggtcatgcctgtaatcccagcactttgggaggctgaggcagacagatcacttgaggtcaggagtttgagatcagcttggccaacatggcaaaacctcgtctctactaaaaatacaaaaattagccgggtatgatggcgcatgcttgtagtcccagctactcaggaggctgaggcaggagaatcacatgaacctgggaggcagaggttgcagtgagctaagatcacgccactgcactccagcctgggtgacagagcaagactctgtctcaaaaagaaaaaaaaaaaaaattcaacaatcagattaaaaacaaaaaaaaattcctaacttctcctggaaaaaaaaaaaattagaagatacagcaactctggccctaccctccatgaggcaaactgcagttgcctcatccagacagggcatatgctgtgcacttcaccacagtccccaccactccctgttgtctcacagcacagaatccagccccattcactcatttaaagcccacctgatccctgtaaacctcggagcaggtcacttctgatctagcccaacaactctcagcacaacaggggaacctgaagcccagagaggttaaatgacctgctcttgttcaaagaatcaaagaactagttagctaaaactagttaaaactaggcaacctgcctttttttttttttttttttttttgagacggagtcttgctctgtggccctggctggagtgcagtagcgcgatctcagctcactgcaagcactgcctcccaggttcacgccattctcctgcctcagcctcccgagtagctgggattacgggcacgtgccaccacacccggctaatttttttatttttagttttagagatggggtttcaccatgttggccaggatggtctcgatctcttgaccttgtgattcgcccacctcggcctcccaaaatgctggaattacagaagtgagccacagtgctcaccggccctgctttaaatttcacaaggactgcctcaatttcagataaacttcatcatatttctaccctagcttttctcaagggagggaagctgggagaagacagaatattgtctctggttggcctaaatgaaaaagtacggtcaggcatggtggcttacacctgtaattccagcactttgggaggctgaggcaggcagatcacctgaggtcaggagttccagaccagcctggccaacaccgtgaaaccctgtcttactaaaagtataaaatttagccaggcatggtggcacatgcctataatcccagctactcgggaggctgaggcacaagaatcacttgaatccaggaggtggaggttgcgcaggtgagctggtatctcgacactgcactccatcctgggagacagaatgagactctgtctcaaaaaaaacaaacaaacctgaaaaaagtgcatttgaaatatttgatggcttcctaaaaaaactccaggaagctcatggactcccagctggaatggatcagagaaggggaagactttgaaggatcataaaatctggtttttcaagtgcctgcctagccacgataccctctgacagtcctcagataagggcttagcacccccatttccattcctgcatttctggggacacctccaaacatcccccacccctattccaacagatctactttcctttgggggctgcggtaggaaacctgggaaccagaagacaaacagaaggaaagcagggcctaatttacaactgaaaccacccatggcctgcagagacagccacgtaatgggtcgcccagggacactgaggggccagagcggagcttggcaaaatgccctatttgttttcgggaaaccgttggtgcttgttgagtcagattaataaataccttcagggtttcctctgacaacattctccagcaaggggtactttgaacctttaggccactgtgagaatcattaacaaccccccactcctgcccctgccaacccaaccactgccagtttaacaatgagcttgagtcaggctcgggcctcagaaagggtgactgctgttgtcgttaagagaacaaggcacacaaaactgccctagttcctgcctgagaaagtccaagttccctgctcacaggggcctctctgaccaccctctgtctctaaggctggccatcctgggccaacctctatgatattcagagttcattattccctagaaaacatcacttccctaggtgatctgatttgtttacttgtctataaaagtctcctcccatcctccaacaagagaaatcacaaaagcagagcctcgcctgatcttcaggcacctcaactgtgcctgccacttaacaggtgctcaatagccaggcacaggggctcactcctgaaatcccagcactctgggaggctgaggcaggaggatcacttgaggccaagactttgagacaagcctgtgcaacacggtgaaaccctgtctctactaaaactttaaaaaattcaattagccaggtgtgctggcacgtgcctgtagtcccagctatttgggaggctgaggcaggagaaccacttgaacatgggaggcagaggttgcagtgagccaagattgagccattgcattccagcctgggcaacaagagtgaaactccatctcaaaaaaaaaaaaaaggtgctcaatgaatccatgaataggtaaatcaattgttgtccactcctaggaaagccatacaccatcaaggctgcccacctgcccccttggccacagagcaggcctgtccaagggtcaaccagaaccctaggccacaaaacataccacggccttcccagcacatgacagggagtcccaaaatcgggggcctctctcacgtcacacagatgacatgagttgctctctgctatgggagtggacaattcccatgtccaaacttgtcttgggatagggacactgcttgactttttaaaagccaaaacgctacagtatttttcccagcctcctccagtaacaacctgctttgcacccagttgcaaaaggagctggagaagagattcccagacaaacttcccacccaggacctcaagtcatcaggtattccgtgagtaacaaaagcaacacaggccaggcacagtggctcatgtttgtaatcccagcactctgggagaccaaggcaggaggatcacttgaggacaacagttcgagaacaacctgggcaacacagcaagaccctgtctctacaaataatttttaaaaaatcagtcgggcattggccaggcacagtggctcacgcctgtaatcccagcactttgggaggctgaggcgggtggatcacgaggtcaggagttcgagaccagcctggccaagttggtgaaacctcgtctctactaaaaatacaaaaatgagccgggcacggtggcgggcacctgtaatcccagctactgaggaggctgaggcaggagaatcacttgaacctgggaagcagaagttgcagtgagccaagatcacgccactgcactctagcctgggtgacagagcaagactccgtctcaaaaaaaaaaaaaattagtcgggcatggtggtgcatgcctgtggtcccagctactcagtaggctgttaggaggattgcttgaagagcccaggaggttgggggctacagtgagctgtgattgcacattgcactccagcctgggcaacaagagcgaaactccatctgaaaaaaaagaaaaaaggtggcatgacgccagacgcagtagctcgcgcctgtaattccagcactttgcgaggtggaggcagacggatcacttgaggccaggcgttcaagaccaggctggccaacatggtgaaaccccgtctctactaaaaagacaaaaaattagccaagcatggtggtgcatgcctgtggtcccagctactggggaggctgaggcaggagaatcacttgaacccaggagacacaggttgcagtgagccgagatcacgccactgcactctagcctgggcgacagagcaagactgtctccaaacaaacaaaaaacaaggcggcacggggctaaccatggtctccagtagaactctgaaggaagaagaaactctgcactctttgtaaacagagtgctggcacattgtcttttgttgcatttcgttgcctggagagggtttatagaggtctagacacaggtaaggcttctctgagttctatgctgggtaagtaactgttttaccacgagagcatactaatgagtgccctagatcacgggggtgtactgagccctctcattagcaaggtggacactggcaatagaaatatcccctctccttcctttctgcttttctttcctttatatattcaataaacatttaccaagcaaattctgcaccaggcatagtgtcaggcagtggagaaaatagacaagtcccagagaaagccagaaaacaaacctcgagacaaaaattgggcttcccatcaagatggctgactgaattgaagccaaatgccacaccgtctgcatctatctcccacccacccaatccccaaacacacaaacaggcggggtaaaatatctgttttcaacataaccaagctataggcaagaaagggacgactccagatgccagaaatgaggaggaaacccaaagctgaaaccaagagcctggcctgggagtttagggaacagatgactaggactcaggagaggcagggaagccagaagacacctacttcagaaggttttccgctccggtcctcatccgcacggctttcaggatctgctgattcaaagcagctctttgattctgcaatttactccggccggtttgtgcaaggggattacagccctgaggaaaaataagagatgccccttcagaggtcggccactctaaaaatgatgacagggtttaatataatggaaaatgtttaactttaaaaataatcttttctgaaaacaaagcatctacatagaaaatattgaaaagtataaagaaaagtcgctcataacaacacaattgcaaaacagccactgtgaattggtctttccttctcatctattttatttatgtaatttattttagagacaaggtctgagctaggcactgtggctcatgcctgtaatcccagaactttggaaggccaaggcgggtggatcacctgaagtcaggagttcaagaccagcctggccaacatggtgaaaccctgtttctactaaaaatacaaaaaattaaccaggtgtggtggtgggcgcctataatcccagctactcaggaggctgaggcacgagaatcgcttgaacctgggtgctgaaggttgcagtgagccgagattatgccactgcactccagcctcggcaaccaaagtgagacgctgtctcaaaaataaataaattaattaaagacatatctctagggcagagttataagatcaaacctttcagggctacccatgggccagcccaatcatcctccaggacagaaaggcacccacacccttgtgaccgctttccccctcactgttactgagtatctactttttttttttttttttttggagatggagtctcgctgcgtgcctaggatgcagtgcagtggcgcgatctcggctcactgcaatctccgactcctgggttcaagtgattctcatgcctcagctttccaagtagctgggactacaggtgcatgtcaccatgtccaggtaatttttgtatttttagtagacacagggtttcgccatgttgcccaggctcgtcttgaactcttgacttcaagtgatccacctgccttggcctccccaaagggctgggatggcaggtgtgagccactgcgcctggcctactttttttatttagtaacagctttatggagatataatccatataccatacgttttgcccttttaaaataaacaattcattggtttttagtatattcaggagttacagaaccatcagtgctatctgattttttttttttagatggagtcttgctgtgtcatccaggctgcagtgcagtggcacaatctcggctcactgcaacctctgcctcccaggttcaagtgattctcctgcctcagcctcccgagtagctggaattacaggtgcccaccaccacgcctggctaatttttgtatttttagtagagacagggtttcgccatgttggccaggctggtcctgaactcctaacctcaagtgatctgcctacctcagccccccaaagtgctgggattacaggcgcgagccaccacgcccatcaaccactatctgattttagaacattttcatcagcctaaaaaaaaagcaagtagccattagcatcgctcctcatttccttttccccttaaccccagccctaggcaaccaccaatctactttctgtctttacaggtttgcttattcaagattatttcatataaacggaatcatataatatgtggcctttgcatctggcttctttcatttgccatgatgttctcaaggtttatccaggttgtagcatgtatcagaactttgtccgtttttgtccctgaataagatttcattacatagatacaccacacttgtgtactttatccattcatcattcatcatacaatgggcatggggagtgttttcactttttgactattacgaataaggctgtttatgtgcgtacaaggttttatatggatatgtgcttttgtttctcttggctataaatatagaaataaaatgtctagatcaggtggtttttttgttttgtttttatttttgattctgtttttttgagacagaggcttgttctgtcgtccaggcttgagtgcagtggctcgatctcggctcattgcaacctctgtctcccaggttcgaacgattctcctgcttcagcctcccgggtagctgggattacaggcgtgcaccaccatgaccagataatttttgtatttttagtagagaggcgggtttcatgatgttggccagggtgatctcaaactcctgacctcaagtgatccgcttggcttggcttcccaatatgctgggattacaggcgtgagccactgagcccggtctagatcatatgatttattctatgtttaatgatttgaggaactatcaggctcttcaaagtggttatacaattttacaacccaactaacaggatgagagttccaattcatctacatctcaccaatacaggtgctggtctatcttttttattacagctaccttatgtgtgtgctgtctcacatcgtggttttgaattgtgtctccctgacagttaatgatgttgaatatcttttcatgaacttattggccaactgtatatcttcttcgaagaaatatcaattcagatcctttgcccattttttttttttgaaacagggtctcagtctgtcacccagactggactgctgcagtggtatgatcttggctcactgcaaccttcacctcctgggttcaagtgattctcctgcctcagcctcctgagcagctgggactacaggtgcatgccaccacgtccggctaattgttccattttttggtagagacaaggtttcaccatttttttgccaggctggtcttgaattcctgacctcaagtgatctgcccatcttggcctcccaaagtgctagtcttacaggtgtgagccaccacacccagctctcctttgcccagttttaaactggattgtctttttatctgtctggttgaaaattatttttaatttctgtcaagttgacatgcaaaaatagatagctcattcttctaatttgtatgtttattataacagtgaaggtaaaggtttttccatataatcttgacactttaatttctttttcaacaaattgtctgtgttctctgaccattgtgccctggggtatttggattacaacgcttcacgctaaaagtttaagatcagaataaaagctgcattttagctgaatggtgttcttcccaccccagacaggtagaagcctcaggacctgggatacgcccacattcctctttgccgcttatctctaggtcctgcccactgcggttactccctgggagcggtctggcgggtagtattacgtggtgaagagactgccctttctctctccctgagtcacatctcaggcctgcacacacctggcctctccgacctctgcccaagccacacccatggcctggaccccagggagggagatgtgagttatctatagcggaaacctcctcaggaatcccagtattctccttccacagagatttctcattcttggccagaatggtcatggtagctcacaactgtaatcccaagcactttgagaggctgaggccagaggatcgcttgaggccaggagtttgaggctgcggtgagctacaattgcgccactgcactccagcctggataacagagtgagactctgtctctacaaataataataaaaatttttaaataataataaaaataaaagacttctcattctcatttcccatcaggtcaccaccacccatcccccacatagccccacaacctaattttccctgtctcgcaaggacactttcccccaagttcaaattgcacagatattcggaattcgagttggcttctgtagacaggctggagtgcagtggtacgatctcagctcagtacagcctctgcctcctgggttcaagtgattatcctgcctcagcctgctgagtagctggaattacaggcacccaccaccacacccagctaatctttctatttttagtagagatggggtttcaccgtgttggccaggctggtctcgaactcctgacctcaggtgatccacccgcctcggcctcccaaagtgctgggattacaggcatgagccatggcatccagccctggaatggattttaaaattaatatcgtttaaagcattaaacggtttccaattttgtctttcttcagatttaagattaaaatatctttggccgggcatagtagttcacgcctgtaatcccagcactttgggaggctgaggcgggtagatcacctgaggacaggagttcgagaacagcctggccaacatggtgaaaccctgtctctactaaaaatataaaaattagctgggcgtagtggcatgcgcctataatcccagctactctggaggctgaggcaggagaatcacttgaacccgggaggcagaggttgcagtgagccaagataacaccactgcactccagcctgggtgacacagcgagactcagtctcaaaaaaaaaaaaaaaaaaaactttaatgttaagctattataattaaatattaaataactaaaataactgttcatctctttcctttccacttccaaaaatgacgacgattcagtttgactctgaattacctggatcaccactgctgtgtttcattttacagggaagcttgaataactaattcctttacgtacattcccagagctcagataagcagccattccaaactacggataagaatgtttttttttctgttcgtatactttccccaacttctgctggcctggaatcagtacgccctaaccagcccatagatatgtggtcaggtttctagataaggcataggaacacttagggttagatttgactgagtaattgggcccgaaaccacattacttattcctgacaggtaggaatgttgggctttgctggggaacacaagaaacacccacggggctgtgtgtggaaacttccctgagaggtaaatctggacaagactgtcagaaagactccctggcatcaccagaaactattggccatctactagcccctgccaggggctgctctgtaggggacaaggtggcgggtccaccatccccacccatacatttctcaccccaccccctatcttgtgtaataacgagaccttagccctgaacaaacagcttccagaatagcctctgcaactcagagacagggattggttctcaacagaacacaaagccgctctgagactggagtgagggtttgcaccagggactggggctaaacctctcacacctgtggggccaactgagctgtcctgacctcgggatctgctgttgacaagttctacagtgaagtgagactttctcctccacagagtctattcccttcccacactaaggttcggacatttccgtcagtcccgaaacttgaagagtgggcaaacagccaacacccaagaaaagcaagtactgagtgaacccccgtgtcatcaccagctttacaggcaactcctggggtcggcccgcttatgtggaccctggtacagcatctcggatcccatggttctgcagcaaggaggctatatgagcaacttgagatcctagaggcaggcagtaaaagttggggtgggatttaagaccctgtccttcctgctgctccaggatgagcggtgaggcggtgtgagcggtaggaatgcatgcaacccccagacaccccttcatgggtgatggctgcccaccatcaccccacatcttttgggggaacagtgatgccagcccactctcccgcctcatagcccatgatggcctggtggggggcaggggtgtgtgtgtaaatccatgctcccccaacatcctttccaaagggaagaacatctgacttctgcctggcccattggaaaaccaaagcctgaagatcagggtcaatcgaaacccatcaggaagaggtcctcattggccttgaacctgggaggctgtgacactgagcagttgcagccaccttaccaccagcagaagagtgtctccctagacagggaaccaaccccaggtgggctgagctgagaaacagatttggcgatgtcatctgagccctggatcaagctaggcctgaagccatccctctgtacttttcatttacagcaaccaattcattcccttctttgtatctcaattttctgaattgagatacaatttatatataataaaatacacatattttaagtatatagttcaatgagtttgaacaaacatataaacctgcgtaaccatcactcctatcaaaatacagaacacagaacatttccatcatccccaggcaaccaatactctgatttctatcaccacatatttttgtctgcttttgaactatgtaaatgtaatcagataggatgtagacttttatgtctggtttattttgctcaataccatgttttcagattcacccatgctgtttcatttaccagtagtttgttcctttttttgtttttttagacagagtttcgctcttgttgcccgggctggagcacagtggcgtgaactcggctcactgcaaactccacctcccgggctcaagcgattctcctgcctcagcctcctgagtagctagaattgcaggcacccgccaccacacccggctaatttgtgtgttccttttttattgtgggatagaattctattggaggaacatactagggtgtgtttatctgccaaagttattttggattaaattttctagcacctgcaactaaaaaagtactaactcaaataagtttacctagagtgaaaactcttttctttcctttgagacagagtctcactctgtcacccaagctggagtgcagtggcatgatctcaactcactgcaacctccgcctcctggactcaagcgattctcctgtctcagcctcctgagtagctgggattacaggtgcacaccaccatgcccggctaatttttgtatttttagtagacacagggttttgccatgttggccaggctggtctcaaactcctggacttaagtgatctgcccacctcgccctcccaaagtgctgggactacaggtgcgagccaccgcactggcctagagtgaaaactctctttacaggtcacttacatgcccttaatgtacagtcagattgttcacctgtaagacacgtatttaagagcagcacctagacaaagcccacaggcaggaagactgtacttccagggatcatttctacagttcgttactagagaagtttctctgtacgtgtacagcaaccgtttatattagtgtggcacacacctatctgaaagctttgagtgcagcaatgcggattcaccttgcttgtaactactgttcttaagctcataaaacagctaaataatgtggtgtaacaactaaatgtgtgcccagagaaaagcctcagaatgttatcctaggtgaaatctgttcagtgaacagacagatcacagctacagtgacatttctgccactgttacaagtttcttacaaagtgagaaagtggctgtctaaaatcagacaaaggcctggtgtggtggctcacgtgtataatcatggcactttgggaggctgaggtgggcggatcacttgaggtcagtagtttgagaccagactggccaacatggtgcaaccctgtctcaagcaaaaaatacaaaacttagcccaggcgtggtggcgtgtgtctatagtcccagctactcgggagtcggaggttgcagtgagccgagaacttgccactgccctcctgcctgggtgacagagtgagaccctgtctcaaaaaaaaaaaaaaaaaaagaattaaagtcagaaagagagcccttaccaaaaactgaccgtgctggcaccttgatcttggatttctagcctctagaactgtgaaaaataaatttatgttaagttaaaaaaaaaatataaaactggaggcaggcacttaattaggaagaaaggaaagggtggtcaagctactcctggaacagggcagtttttcttcccctatgggggccctgctccattctgggcagtgcctggcacctgcttcccctccactataggcaatagtatgggcccttcttctgcacagccaaagataaagctcacacatgcagaggtgtttccagcaaatttagggcaatgtgcaagcttgggatctaaaggttcaggcgtaaaactaagtgagagatgacacggtagggctgggccagctcccagccagagagaccttcccacgggatacaggaaggcaggtgtttttagctgcttctccagcaaagattattttctctgcctttctcactccttcctggttacgcaatccctcactcaaccaccaaactctggaaaacagaattgcttgtttataagtcagccagagcaatcaatgagaaagcacagaaaatagcatgcagtacactgcaatacacacatacatctaatttaacttttcaccacactggagattcagggcaggctgggtggaaagaatctagcttgtccatgtccataaaaataaaaacatgaattcagtacttgtcaacagccctcctgcccttccaggatctctgccaggtgtcagggctggaggtgagggcccagccgcctcccccgggaatcccaatccattcacacaggggtggaggggggctcgatatgagtcaacacagccataatctttagttacgagctcccttcagtctcttccagaaatctctataaacccctactgtgtgccaatcacagttatttttcaatatgctgaataacttttttttttttttgagacgaagtcttgctctgttgcccaggctggagtgcagtggtgtgatctcggctcactgcaacctccacctcccgggttcaagcgattctcctgtttcagcctcctgagtagctgggattacaggaatgtgccaacacacctggctaatttttgttttgttttgttttgttttgttttagtagagacgaggtttcaccatgttggccaggctgctctcaaactcctggcctcaagtgatccacccacctcagcctcccaaagtgttaggattacaggtgtgagccactgcgcccagccttgaataactaggcttttactgtgcctcccaccacatcaaatcgtgaacatttccatgaatcaactgtatttccagaccaatgatctgcttatttcaactggtaggacacactcaacaacagttttaacagttttgcttttttttttttttttgagatggagtctcgctctcttgcccaggctggagtgcagtggtgcgatcttggctcactacaacctctgcctcctaggttcaagcgattctcctgcctcagcctccagagtagctgggattacaggcgcacaccaccatgcctggctaatttttgtatttttagtagagatggggtttcaccatgttggtcaggctagtcttgaactcctgacctcgtgatccacctgccttggcctccaaagtgctgggattacaggcgtgagccactgtacctggacacccagctaatttttgtattttttactagagacgtggtttcaccatgttggccaggttggtcttgaactcctaagacctcaggtgatccacctgcctcagcctcccaaagtgctgggattacaggtgtgagccaccgcgcccagtctcttgtttttgagacaggatctcactctcttgcccaggctggactgcagtggcgtgatctccattcactgcagcctcaatatcctggggctcaagcaatcctcccacctcagcctcccgagaagctgggactacaggtccacaccaccacacttggctaattttattgtattttttgtagagacagagttttgtcgatgcagcccaggctggtcttgaactcctgagctcatgtgatctgtccaccgtggcctcctaaagtgctgggatcataggtgtgagccactacatccagccttgtttttttaccacctgcccttttttcttctttgttttttttttttttttttgagacagaatcttgctctgtcacccagcaggccggagtgcagtggcacaatctcagctgactgcaacccccacctccgaggttcaagcgattctcctgcctcagcctcccgagtagctgggattacaggcacgcagcaccacacccgactaattttgcatttttagtaggaacagggtttcaccatgttgtccaggctggtctcgaactcctgacctcaaatgatcctcctgcctcggactcccaaagtgctgggatcacaggtgtgagccactgtgctggtccccttttctcttgttacaatcaaatggaaacctggccatagggaactccgagggtctgaatgggcagccctgagggactcacatcattcaccgtggtgtctccgtccctggtgctccaagtggggaaccttgtcctcacttggcacccattactgctgctctgccagacacccagcctctggctgagcggtacctgcagttcgactgtgtcctatggctacctccaatgcagcctttgtgtcacgggacgctggtacctgagccaaaggaggaagtgttgatcaggctaaagccaacgcccagtagcatcaggtggtgtcgtggcaaccatccaaatggccccaggaaacaagggacatttacagtgttatagttcatcacgttgtctctcctctgagtcaccctgaaaattctgtttctgccaggggatacctcccagccaggatcccacagttgaagactgttggtcaggcagaccctcggggctgatggtggataccatgcagctgggcagaccctcccctctccaaggccacagtcagcctggatccagcctggcctttaagatctggcttagggctgggtgcagtgattcacacctgtaatagcccaccactgagatgggaggattgcttgaggccaggagttgaagaccagcctaggcaacacagtaagaccccatctctacaaaaaataaaaataaaaatcagccaggtgtggcaatttttaatcacatctctagtcccagctagttgggaggctgaggcaggaggatcacttgagcccaggaggtcaaggctacagtgagctacaacggtgccactgcactccagcctgggtgacacagccagattctgtcatctttaaaaaaaaaaaaagctgttttagaccatcatggggaatcaggagtggggtcagcatcaccaacctttactctcctctgcctccctccctctccacctgggaattgactcaagggtccaaggggatggatctaaacagccggaggggtagtatcagtaccaatagagctggagctgctgatcccacatgacccacgctgttcctggtggactcagcccatcagaaggcttcctcatccacacaagcgttcataaaagatgcacacaagtgtctaacacgaaattagccctcactaagatgaatgctgctcattcatcaaagagtagatccctgctccttgcagagagaagactgcaaggagcttctgggttaaaaaaaaaaaaaaacaacaacaaacaaaaattctccttccttctctgccggagcctccaggaagcccagagtcaacagggaccataaaccaggacacaatgaacccggaggccctgtccaggctggaggtttctgtgaacaagaaacaacttctcctacagctcttgagtaaaaacaatggagctaaattcattttggggcattagcattcccaaaggatgaagaggcagagataagaagtgacaatgcctcactgtgtactcactctcctcttccacatagtgccaagacctttcattttgggcctttcaatggccctggggaaaggctttctctagtttgtttccagctgcttttcttttcttttttttttcttttttcctttttttttttttgagacggagttttttgctcgttgccctggctggagtgcaatggcgtgatctcagctcactgcaacctctgcctctcaggttcaagccattctcctgcctcagcctcccgagtagctgggattacaggcatgcaccaccacacccagctaattttgtattttcagtagagacggggtttctccatgttggtcaggctggtctcgaactcccaacctcaggtgatccacccacctcagcttcccaaagtgctgggattacaggcatgagccaccacccccggccttccagctgcttttcttcatggccacaacagattttcctgtgagttttagtactgtggggtacaggggcagttgcagaaaaggaatctctatcaggatgcagcattctagaaaattacattactctgcatttaactacaggccagagaacaataattcttccaagattttcagtaggaagagcataaaaatctggggaaaagaagttgcatttccacttcttgagaaattatagtaatataagttgagaaagtaatttataataatcttatagagctgtacctctgtttaaacacagtaacataatgagaaagaaaaaatatagtgagaagccagggaaagctgggtgcggtggctcatgcctgtaatccgagcactgtggaaggctgaggcttgggcccaaagagttcgagaccaggccgggcgcagtggctcacgcctgtaatcccagcactttgggaagccgaggcgggcagatcacaaggtcatgagattgagaccatcctggctaacatggtgaaaccccatctctaataaaaatacaaaaaaaaaaaaaaaaattagccggacatggtggcggtcgcctgtagtcccagctactcaggaggctgaggtaggagaatggcgtggacccgggaggtggagcttgcagtgagccgagatggtgccactgcactccagcctgggcaacagagccagactctgtctcaaaaaaaaaaaaaaaaagagttcgaggccagcccaggcaacacagtgagaccgtctctacaaaaaatttaaaaattagccaggctttgtggctcatgcctgttgtcccagctactcaggaggctgagacaggaggatcactggagccagggaggttgaggctgcagtgagctatgatcatgccactgcactccagcctggatgacacagcaacaccctgtcaaaaaagaaagaaaagacaagaaaagaaaagaaaaaagtgagagacatgattttataatagacctgaggctgggcatgatggctcacgcctgtaatcccagcactttgggaggtcaaggcaggcagatcacctgaggtctggagttcgagaccaacatggagaaactttgtctctactaaaaatacaaaattagccgggcatgatggcacatgcctgtaatcccagctactcaggagcctgaggcacatcacttgaacccaggaggcagaggctgtggtgagccaagaccgtgccactgcactcctgcctgggtgacagagcgaaactccatctcaaaaaaaaaaaaaaagatagaaaaaaaaaaatagacctgaaaggtttcttttttcagagacctcccaaggtaccagcccagaccaggagatctgtactgcgggtgtccatttccaacctgaggctaagttatgtcttgaggctctgtacagccaagtcatcctacctgattccaaaaagaccaattaacaaggggactcctgggctcggcgcagtggctcacacctgtaatcccagcactttgggaggccaaggcgggcaaatcacttgaggtcaggagttcaggaccagcctggacaacatagtgaaacaccatctctactaaaaatacaaaaattagctgggcatggtggcgggtgcctataatcccagctacttgggaggctgaggcaggagtattgcttgaaccccggaggcggaggatgcagtgagccgagagtgcaccactgcactccagcctgggcaacagagcgagactccatttcagaaacaaaaaaagccaagaggctgattccttttcaagcatggccggagccatcccaacaaagcaccaattcccagcactgctcagcactccaggaaacgagacctgctgggaactgctgccaaagaaactgtatcgagtcagggtctggaatgccccagaacctgaggaggggtcaggcactgagctgtcgctccataaatccttttcggatgaatggagcataatgtcattttaaagaaaaggggagggaaggcatgacacagagaacaggatgaaagagaagcctgacttcagtggaaattcatttgatccttaagtgtgcataaaatcccaatagtcaccaggcgcagtggctcatgcctgtaatcccagcactttgggaggccgaggcaggtggattacgcagtcaagaggttgagaccatcctggacaacatggtgaaaccccaactctactaaaaatacaaaaattagctgggcgtggtggcacgcgcctgtagtcccagctactcaggaagctgagacaggagaatcacttgaacccgggaggcggaggttgcagtgagccaagatcccgccattccattccagcctggcgacagagcgagactccgtctcaataacaacaaagaaatcccaatagtcaaaatacaggtccaggtgcagggactcacacctataatcccagcactttgggaggccaaggtgggtggatcacttgaggtcaggagttcaagaccagcctgaccaacatggtgaaaccctgtctctactaaaaaatacaattagccgggcatggtggcgcacatctgtagtctcagccactcaggtggctgaggcatgagaatcgcttgaacccaggaggtgaaggttgcggggagctgagattgtgccactgcactccagcctgggggacagagcaagactctgtctcaaaaaaaaataataataatacaagatgggaagcctcatgggttctcactcactgcccccggctggctcagccacccaatcaatgcagcagctgttggcaatcttcaccccccgcctcgactcctgggccccatccccagctcaccttctccctgaatctccagccattccccacccaacttcttcacttttgtttttttcttttatcattttttttttttttgagacggagtctcgctctgctgctcaggctagagtgcagtggcgcgatctcggctcactgcaacctccacctcacaggttcaggcaattctcctgcctcagcctcccgagtagctgggatcacaggtgcccgccaccacgccttgctcattttttgtatttttagtagagacagggtttcaccgtgttggccaggctgctctcaaacttctgacctcaggtgatccgcctgcctcggcctcccaaagtgctgggactacagtgtgagccactgtgccctgccacacctttgtctttaaccagctctggacttccacattctaaaacaaagctgccttctctcttctcagctcccctctttctccagcaatatcttccctgcccttctccccctgtaccctgtcacactgacttttgtccccaattctccaaccatgcatttcctaacgactcctaaagaactaaatctaggaccttccagcattcttctgacttgtcacgccttgctcgactaacaagactgacctctcagcttcctagacctggccacccttctggctttcctcccacctctctacccacctcttaagcggaggatcctttctagcccagatcctttcactcaataccccaactgcctcccagttggtgccacccaaaactgcatctccagccagggcgcctgcatggctgctgggcccatggagtgggctctctgctgggaccgccacatggatatcccatgagggccatcaagtctacacactagcctccgcgttcacccgcattcatggatcttgaggaggcgcatgaccagacacctcaggcaggcattgtgacgttttttttgagacagggtctcattctgctgtccaggttggaatgcagtggcgtgatctcggctcactgcagcctccatctcccaggctcagcgatcctgctgcctcagcctcctgagtaggtgggaccatagctgggtgccaccacacctggctaataggcaggcattttggattctcattggcagctccttccctgccaatcacatcagttctttccctctctgccagatattgccctttctccagctctatcattccaacctcctcatcactagaatccctgccttctgtgtggacccctggtctgagctaagggtgcaagctggtggaaagaatgggtgattgaggctgtgtttacacggccgtttctttgtttgtttgtttgttttttgtgagacaaggtctcactctgtcatccaggctggagtgcagtgacatgataacagctcactgcagcctcaacctcgtgggctccggatatcctcccacctaggcctcctgagtatatgggattacaggaacacaacactatgccaggctgatttttaaacttcttatagagatggggtcttgcttattgcccagagtgggcttgaattcctggcctcaagcaatcctcccaccttggcctcccaaaatgctgagattacaggtgtgaggcactgcaccccactcacagcactgtcactgactgcatcatcagtagtccgtaaaagagaaggaagggcaaagatgataggtattacaaggggctaaatcctcccaatgcctccctgcctggctccaccatagcttctttcccattcgccacccattcaccattcacgtgtcaaagcggtctttttcttacacaaatctcacaggtctggtcctgctttaaatactttgatggattccacagttcccaggtcaagcaagatgcatgaccctgaactgcctggctcccacaaacacctccacaccctgggggggcctacaaagcactcacaagtccacagctctgtccaagctgttccctcttcctgaagggctctttctctcctttcacctggacagcacctgcctttctttttttttttttttttttttgagacggagtctcgctctgtcacccaggcagtggcgcaatctcggctcactgcaagctccgccattctcctgcctcagcctcccgagtagctgggactacaggcacccgccaccacgcccggctaattttttgtatttttagtagagacggggtttcactgtgttagccaggaaggtctcgatctcctgacctcgtgatccactagactcagcctcccaaagtgctgggatttttttttttttttgggttgcaggggtacggagtctcactctgttgcccaggctggagtgcagtggcacaatctcagctcactgcaacctccgcctcctgggttcaagcgagtctcctgcctcagtctcccaagtagctgggattacaggcgcctgccgctacacccggctaatttttatatttttagtagagacagggtttcaccatgtaggccaggctggtctcgaactcctgatctcaagtgatccacctgcctcagcatctcaaaatactgggattacgggtgtgagccaccacgcctggtcagcacctgcctttcattcggccatttggttttgttttgttttcatttttatttttaaaattttttatagagccaaggtcttgctatgttgcccaggctggtctggaactcctggcttcaagagatccgcctgcctcggcctcccaaactactgggattacaggtatgagccaccacacccgaccctcatttgctttaggtcaaactggctcaggtcatagatcaggaaagattcagcatcaacaccttttattttcctaggataaatagactcttcgaactggtatgacttaacatggagtagcacaacaattgttacaaggtctcattttcaaaattgatgattttaattgtaaaacaatgattcctcttattttgcacccctgattctctcatccaacaccagagaaactgcatctaaaaaacaccccactttaggaggccgaggtgggtggatcacctgaggtcaggagttcaagaccagcctggccaacatggcaaaaccttgcctctactaaaaatacaaaagttagccaggcgtggttgatatgcgcctgtagtctcagctactgggaaggctgaggcgggagaatcacttgaaactggtagatggaggttgcagtgagccgagatcgcgccactgcactccagcctgggtgacagagcgagactccatctcagggggaaaaaaaaaaaaacacctgtagccgggcgcagtggcttacacctgtaatcccagcactttggaaggccatggcaggtggatcacttaaggtcaggagttcaagactagcctgggcaacacggtgaaaccccgtttctactaaaaatacaaaaaattagccaggtgtggtggcaggcgcctgtaatcccagctacttcggaggctgaggcagaactgcttgaaccccggaggcagaggttgcagtgagccgaaatcacaccactgcactccagcctgagcgacagagtgagactctgtttcataataataataataataataataataataataataattaataaatgaaaaacacccaactgtgcacctttcctagctctcttgccatccactctttcccagtgcggagcaagaagtcctcccctgggctcacagacacggagggctcccacaggaaaatgtgttctgggaggcttgggaccacccctcacaggtgtgcttctcttgctgccattttcccccaggtgctgctggagttccagagctacacctgctcagagaacaatctggggaggaaatgtcccagaaagaggcagcaacttgcgggaggccacacagcaattttgtgggagtggcagtcaggccccggggcccgaggacagacataggaattcccaggccaggcctcctcctgcaattccatggcctgtgatcctctgtcccaaacgccacacataattagaagttataatcctgtaattccatgatgacatctttaaacttaaatatacctcaaaactactttttttttttttaatgctaaaagcaacttcacaaaaaagaagttttcccactctgccccacactgtcctgcccagggctcctcaccagtgagcaaagcccacagtctctctgtgtcacctgggagaaggaggaagatgccaagaccatttaagaactggatcctaaggctttgaacaattaagaattgattcgtttatgggaaagtttcacttccctatttataattatgcactgtcgtatctattataaaaacgaaaatcaacaacaatctctccaccctctcagtgatccctggccaagggccaaaagctatttttagacttgctcaggacctagagggaggaaggcttggaaggcatcaccatgactcccggctccaaagcatctttgtagcccaggccctgccgcctgcgggtatcccagggcccctgctccacaggctggggtcgcttttgagggactgagctccctgactgttatcttctgggcccaagagctcctggacatgccaagaacctgcgaggccggcacccgccacccgccgcccgccgcccgccgcccgccgccagcccccgccaagtctcccggacaacaagacaaatccgctttggcacacagtgagacgcacaagaccgtgggcctcacctgcggtgctcacgccctcctggacgacccggagcggaggagggtgcaacgccggaggctccctcccaccagcagctctcccctgctccctgaaaagtcccacaggcggactttggaagcattttggaggcaaaaagagaccgccggccgggcgcagtggctcacgcctgtaatcccagcactttgagagaccggggcgggaggatcccttgagcccaagagttcgcgaccagtctgggcaacacagcgataccccagttctacaaaaaattagcgtggcgaggtggcgcgcctgcagtcccagttactcgggaggctggggcgggaggatcgctggaggccaggaagtcgaggctgcagtgagctataatcgcgccactctactccagcctgggcgacagagcgcctaaaataaatatgagaccgccaacacgcctgggatggtctgtctccacccgcgctcccaccaagcgctcttgcaacgcgcccagaggccaagggcgccagcgcagccaggaacgggtcctttccccaggcaccagggatcgcaagcgaggggtggcggggggtgggaggggggagacccaagcacccctccaggtcctccgcccgcacctgcgcggagcggccacatgcgcctcccctactccccgcccagtcccggatgccacctgcccgggacgccggggacatcgccgcccccactcctccccgccagcctccgtccggccagcgccggcccagtgcgccccctccccctcccggcctagtggaccccgactgcgcgctcccacggcccctgcagggcccgggggaaaggaggtctggagcccgcaggtccccgcccgcccgcccgaagccgcccaccttccgaaagtagccgtcgttctccttctccagcggctggggggccgcgggcaacagcgcgtcggtcatgctagcggcgcgggcgcggagggcggacggcggactgaggcgcggcggctgaggctggcccgagaggacgtgcggccccgcccctgtccccgcccttccccgcccctccactcccaccccgtcccgcggcccttctagccccgcctgaggccgagcactggagccctggagacgcgccccgccccgtcgcgggccccgaacccgcgccccttgaggcgctcgtcacccggagagctgcgccctgggcgcggcgcctcggggttgtctgtgggcgtcgtggctgactcaactttgcgagtgccgcgagagcgcaggaaaggcactggggtctcaggggccgcagcgaagccctggctgtggacctgcaccctgccctggagcccggggagtcagtgaggaaggcgtggatccaggcgcgtccctcctgggtgaagcccgtgcgccgcgggggaaggggccagactcgacgccacgtcgagggcgcggcgggagctctgggccctgggcccggcggtttggaaaagcttttcccaagaggggagcccatggcggagggagcgttgactgccccgccgagcgccttgcccggactactcgggcttgttggcatgggatcaactcagccgattccctgtccgcgctgcaaagacgagtgggatccgctgggctcgcggactgccctgagagaggggaccaggaggggttttgcgccccagacacggcagatgtccttgagcacagttcttttttttaagagatgggacctcgctctgtcgcccaggctggagagcagtgttgcgatctcgactctttgcagcctcgacctcccaggatcaagcgatgctccagcctcagcctcccaagtagcaggggctgcaggcgcgggccaacgcgcccggcctttttatttattttttttatttttttatttgagacggagtctcgccctgtcgcccaggctggagtgcaatggcgcgatctcggctcactgcaacttccgcctcccgggttcaagcgattctcctgcctcagcctcccgagtagctgagactacaggcgtccaccaccacacccagctaatcttcagtagagacagtttcaccttgttggctaggcttgtcttgaactcctgaccttgtgatctgcccacctcggcctgcctcccaaagtgctgggattacagcttttgttttgttttgttttgttttgtttttaaatagatgcggggtctcaccatgatatcaaggctggcctcgaactcccgaccttaagtgatcctcactcgtctcgctctgtcgcccaggctgaagtgcaatggcgcgatctcggcttactgcaagctccgccccccgggttcatgccattctcctgcctcagcctcccgagcagctgggactacaggcgccggctaccacgcccggctaatttttttgtatttttagtagagacggggtttcacagtgttttccaggatggtctcgatctcctgacctcgtgatctgcccgcctcagcctcccaaagtgctgggattacaggcgtgagccaccgcacccggccgtggagcacggttcttaaccacctccgttttctaggctgcaaaatggggctcttttattattcttggattctttttttctcgggctgatggagggcagtaggacaaaagtgagtgttggaaagtagggatgaacttagtttaggagggaaagggtgacccatggggacagggtttgtatcagtctgccaccaacctcctgctggctgctagactctgtgggcagacgcctggcagcacgtgaagccaggaccttgccacctaagcagggacacccagcccgcgggccatgctcctcccggccgctgcttactgttacaactgcttctcccccagcaaagggaccgccctcagcggtcgcgatagatgccacaggtggaacagaatgcaatgtgctgcaaaaccagcccagcgttaacatatctttaaaaaaaaaaaaaaaaagtccgggcgcggaggctcacgcctgtaatcccagcactttggaaggccgaggccgaggccgaggctgagactggtggatcacctgaggtcaggagtttgagaccggcctggccaacatggtgaaaccccgtctctactaaaaatacaaaaattagccaggcgtggtggtgggcacctgtaatctcagctactggggaggctgaggcaggaaaatcactcaaactcgggaggcggaggttgcagtgagccaaaccgagaccttgagactgcccactgcactccagcctgggcgacagagtgggaccttgtttcaaaacaacaaaaaacgttagtcattggaaacatagtagaggttgcagctgtcagggacgtttctgaagccagtgtcttcgagcctatgcgcttcctaaaccgcacgtgaagctactgggttggtccaaaggtaattgcaattactgggtgagttgtgccagtcacagaaatgtaatcaggaattcagctcctgtagcctgaaaggacagaacaccctcatccagatttaatcctgcaggtgctgccccaggacctccaccaaagccccttaggagctaagtccttgaggattgaagaaaaactcctccggggaaaaaaaattacattaaaaaaaaagaagaagaagaaacaactatcaatctaatttcagcactcacaggtcacactattacttgtaaacagctactactgtttcaaggatcaggaagttgtgggccactctcttaccttcataatactaataaacgtatcaataatagagcctctactctagccagggagtttatagatactatgtttcgttcttgagacccttctgcaaataaaagcaataaccttcattcaacagatgagaagagcaaggctcagagcaatgaagtggccaccagcactccccttgctggctgaggtcattgcctaccacctttggatttttgccatctttttctgccaacttaaagctcaaattgcctttacaatttgtcgcacataatgccatctgtactgctgttaacttaataatcttttttttttttttttaagacagggtcttgttctgtcatccaggctggagtgcagtggtgcaatcttggctcactgcaacctctgtttcccgggctcagatgatcctcccacctcagcttcccaagtagatggaaccacaggcatgccccaccacactcggctaatttttttttattttttgtagagacggggtttctccatgttgcccaggctgggctggaactcctgagttcaagtgatcctcccacctcagcctcccaaagtggtgggattacaggcatgagccaccacgcctggccaataatcttttttttaaattactttatttaaacaaattaattaaatttatttagttagtttttgagacagtgtctcgccctgttgcccaagctggagtgcattggtatgattatagctcactgcagcctccaattcctggacttgaaggattcttctgcctcagcctcccaagtagttgggacaacaggtgtgcaccactaacttggctaatttttaaatttttgtagagatggggtctcactatattgctcaggctgttctcaaactcctgggctcaagtgatcctcctgccttggcctcctaaagtgctgagattacaggcatgagtcactgtgcctggcccaaattttattttaaaaggcaactatatcacaaccataaggggaaaaccagtgatactttccctgttagaggagaaacataaaagtgaatacaataaagggcaaaatatattattaaatctagccagatatcattgcctttttgagttgttccttttgttaaaaaggaagaagagaccaggcacaggctggagtgccgagatcacaccactgcactccagcctgggtgacacgagtaagaccctgtttcaaataaataagtaaataaaaataacagccaggcatggtggcgcatgcctgtagtctcagctactcaggagactgaggcaggaggattccttgagcccaggaggtggaggctgcagtgagctatgatcgttgccactgcactccagcctgggcaacagaccaagaccctgtttaaaaataaataaataggccgggcacggtggctcacgcctgtaatcccagcactttgggaggccgaggctgatggataatctgaagtcaggggtatgagaccagcctgaccaacatggtgaaacgccgtctctactaaaaaatcaaaacattagctgggcctgatggcacaggcctgtgatcccagctactcaggaggctgagacaggagaattgctttaacctgggaggcagaggttgcagtgagccaacatcgcgccattgcactccagcctgggcaacaagagcgaaactccgtctcaagaaaatagtaataataaaataaataaataaataggccaggcgtggtagcttacgcctataatcccagcactttgggaggccgaggcaggaggatcaggaggtcaggagtttgagaccagactaaccaacatggtgaaaccccgtctctactaaaaatacaaaaattagccgggcatggtggcatgtgcctgtaatcccagctgttcaggaggctgaggcaggagaatcacttgaacccgggaggcagaggttgcagtgagcccagattgcgccactgcactccagcctggaaaacagagcaagactctgtctcaaataagtaagtaaataaataaataaataatgtaaaaaataaaaaggatgaagagtaagaaaaggacgcgtggtgttaaacacacaccagcccacccaaagactacctcctgagcatcttcagaggaaaacgggctcctctctgtgtaagtcccagcggggcatttcctggccatgtgagccatctgagtgtcagtgcttggggctacatctgcgcagaaccagacatctttagacattctcatgactcattgcactggtacccacaggtctgttcttttatctctgatcccactttgaccaggcaattagaactgccgccgctgacccaacaggacagcagcatctcacctcctatttgtcaaccccattggtggtctgtgcaacaagaaccacccatgagcccctgtgctactaacaaaagagttgggtgggaacttctgagctatgcaaaagattaaaatctcaactgcaaacaactgttttgttaagtctcattttaccatctggtttaggtcagcaggtgcctgtccagggacccagttgggtgcctgtccagggacccagttcctccaagtaaaattcaagtgtcacgtcctaagaccttcttgttgacaaaggaatgttggtttttgagggcagcctgaaataacatcctctcttggggaatctgatgaagtttgccaaattaaatgcagaaattataagataatccttgaatgaataaaattcactgcaaatagtaaactcaactttgcaattttttttttttttttttgagacagagtctccctctgttgcctaggctggagtgcagtggcacgatctcagcttaccgcaacctccacctcccaggttcaagtgattctcctgcctcagcctccctaatagctgggattacaggcgcgcaccaccacgccttgctgattttttgtatttttagtagagatggggtttcagcatgttggccaggctggtcttgaactcgtgatctcaggtgatccacctgcctcggcctcccaaagtgctgggattacatgcatgagccaccatgcttggcccattttgcaatttttgtaaaaataattcttagaaattaccaggcccagtggctctcacctgtaatcccagcacattaggaggccaaggcaggaggatcacttgagcccaggagttcaagaccatcctgggcaacatactgaaacatccatctctacaaaaaaatttaattaattagccaggagtggccgggcgcagtggttcacgcctgtaatcccagcactttgggaggctgaggcggagggatcacttgcggtcagaagttcgagacctgcctggccaacatggtgaaaccctgtctctactaaaaatgcaaaaaattagctggacttagtggtgggcacctgtgatcccagctactcaggaggctgaggcaagagaatctcttaaactcaggagatgaaggttgcagtgagccaggatcgcactactgcacttcagcctgggcaacagagtgagactccatcacacacacacacacaaaaagccaggagtggtagcacatgcctgcagttccagatactcaggaagttgaggcagaaggatttcttgagcacaagagttcaagactgcagtgagccaagattacaccaccgtactccagcctgggctacagagcaagatactgtcttataaagaaaaaaaaaaaattggccaggcgcgatggctcacacctgtaatcccggcactttgggagcctgaggtgggtggatcacgaggtcaggagatcgagaccatcctggctaatacggtgaaaccccgtctctactaaaaatacaaaaaattagccaggtgtggtggcatgcgcctgtaaggtcccagctacccaggatgctgaggcaggaggacggcgtgaacccgggaggtggaggttgcagtgagctgagatggcaccactgcactccagcctgagcgacagagtgagacgtcgtctcaaaaaaaaaaaaaaaaaaaaaaattaaaattctcagaaatttaagccatttggtgccatggaggaacaccaactagagaggaccacatcaagttcagcaggctcaaagtccccttagccacacccttttggccctcacagtctcagttttccccactttactaaatatatatatacatattttttttttcgagatggagtcttgctctgtccccctggctggagtgcagtgcagtggtgtgatctcagctcactgcaacctctgcctcctgagttcaagctattctcctgcctcagcctcccgagtagctgagatcttaggcatgtaccaccatgcctggctaatttttgtatttttagtcaggctaaattatattgatcaggctagtctcgaactcctgatctcaagtgatccgcccgtctcagcctcccaacatgctgggattacaggcgtgagccaccgcgcccagtctacaataaattcttacacatagctgtcatttcctgcatacttattccgtgccaggtgctgtcctaagtacactgcatgcattagctcagttctcccacaaccctgtgaggtaggtactttatcatcccctttttacagagaaggaagctgagcctcagaggtcaccagcctcctaagtggcagagtcagggctgtctgatgctatgctatacactatactgtattacactcttccctagtacttaaaaggaaaagtgttttgacatatagggaggaagtgattgtggattaaaaataaatgaattacaagcctgggcaacatggtgaaactgtatctttacaaatgatacaaaaattagccaggtgtggtggcacgtgcctgtagtcccagctacttgggaggctgaggcaggaggattgcttgaacctgggaggtggaggctgcagtgagcccagatggtgccactgcactctagcctgggggacaaagtgagactctgtctcaaaaaaaataaaaaaataaataaagaataaatgaattacagggatggcaaacaataccaagtactggtgagactgtggaatctcatatattgcttatgggagtgtaaattgggatgaccacactggaaaattgtttgacatttgctactaaagaatatatgtgggccaggtgccgtggctcatgcctgtaatcccaacactttgggtggccgaggtgggtggatcacttgaggtcaggagttaagaccagcctggccaacatggtgaaaccctgtctctactaaaaatacaaaaattagctgagcatggtggtggatacctgtaagcccaggtactcgggaggctgaggcaggagaatcacttgaacccggcaggcagagattgcagtgaaccaagatcatgccattgcactccagcctaggcaacaaaagtgtaactccatctcaaaaaaaaaagaaaatatgcatgcaacttatgatccagaaattccaactctaggtagatacacaacagaaatgcatacatctatttactataaaacaggaatcagaatattcacagctgcactattcaaaatagcgtggccaaatgcggtggctcacgacagtaatcccaacacttagggacgcagaggtaggaggatcgtttgagcccaggtgttgagaccagcctgtgcaacatagtgagaccccatctctgaaaaccaaaaaaaaaaaaaaaaagcctctaactagaaagtacccaaatgccaatccactatagaacaaatgagtgtgaatggtggtatattcacacaatagaaaattgcacacaatgaaaattaacacattgctattatgtgcaacaacatggataaatgtcacaaaaatattattgagcaaagaaaactagacacaaatactgtatcattccattttatttgtatttatttatttttttcctgagactgtgttttgctctttcgcctaggctggagtgaagtggcaagatctctgctcactgcaacctccactcaccgggttcaagtgattcccctgcctcagccttctgagtagctgggattacaggcgcgtgccaccatgcctggctaattttttgtaattttagtagagatggggtttcaccatgttggccaggctggtcctgaactcttgacctcaggtgatccacctgctttggtctcccaaagtgttaggattacaagcgtgagccaccaccacgcccagcctccattttatataaagtacaaaatagacaaaactaacccattatggggttattgcttctgggattctggaaattttctatttcttgatctacttgttacacagatatgcttactttgtgaaaatacgcagaaccaggccagtgtggtggtttgtgcctgtaatcccagctactcaggaggctgagacgggagattggcttgacctcaggagctgaagatcagcctgggcaacataaagagaccttttctctacaattaataaacaaattagctggacatgatggtgcccgcctgtagtcttagctacttgtgaggccgagtgagaggatcacttgaggccaggaggtcaaagctgcagtgagctgcaatggcgctactatactacagcctgggcaagagtgcaagaccctatctcttttttttttttttttgagacggagtctcgctctgtcgcccaggctggagtgcagtagcaccatctcggctcactgcaacttctgcctcctaggttcaagcgattctcctgcctcagcctcccgagtagccctatctctttagggccaggcgcggtggctcatgcctgtaatcccagcactttgggattgctgaggcaggcggatcacgaggtcaggagatggagaccatcctggctaacacggtgaaaccccatctctactaaaaatacaaaacattagccaggcatggtggcacatgcctgtagtcccagcaacccaggaagctgaggcaggagaatcgcttgaacctgggaggtggggaggttgcagtaggctgagatggcgccactgcactccagcctgggtgacagagcaaggctccatctcaataaataaataaattaattaaataaacaacaaaaatgcatagaaccatgtgctcatgatttatgcacgttatttttttttaattttcttaaattttagtccatgtcctactgaacatacatgttatattttaaaaaggaaaataatgggctgggcgtagtggctcacgcctgtaatctcagcactttgggaggctgaggcgggagaatcacaaggtcaggagtttgagaccagcctggccaacatggtgaaacaccgtctctactaaatatacaaaaaattagctgggtgtggtggcaggcgcctgtaatcccagctactcgggaggctgaggcaggagaatcgcttgaacctgggaggcggaggttgcagtgagccaagatcgcgccactacactccagcctgggtaacagtgcaagactccatctaaaaaaaaaggaaaacaatgataaaaatgagtgatactggccaggtgcggtggctcacgcctgtaatcccagcactttgggaggccaaggagggcagatcatttgaggtcagttcaagaccagcctgaccaacatgatgaaaccccgtctctactaaaaatgggaagaaactagccaggtgtggtggcaggtgcctgtaatcccagctactcgggaggctgaggcaggagaatcacttcaacccaggaggcagaggttgcagtgagcagagatcgcaccactgcactgtagcctgtgcaacagaacaagactcggtctcaaaaacaacaacaacaaaaacaaaacaaaacaaaaaaagagtgataactgttttcaaagcacattgggtgggtttccgtgcatgttatgagtgaccatcacactgccagcacccatgcatggacccagaggaaggaatgacactgggcccaggtgattcagcccatcttcctatctgcagtttcctcataaggtcctgagatttgcactttcttgcatgtctgaataagaaagcaagcaagcctatattggcttataccttgccataaatataaatacataaataagaggccaggcaccatggctcatacctgtaatcccagtgctttgggaggccaaggcaggagtatcacttgagccttggtgttcaagaccagcctgggcaacacagcaagaccccgtctctacaaaaaatagaaaaattagccaggcttggtggcacatacctgtattcccagctattcagaaggctaggttagtaggattgtttgagcccgggagttccaggctgcattgcactccagcctgggtgacagactgagaccctgtctctaaaaaataaataaatagaacagaaagaaaggaacggtttgtgggctgggtgtggtggcttatgcttgtaatcccagcactttgagaggctgaggtaggaggatcactggcacccaggagcttgagaccagcctgggcaacactgcaaaattgcttctttacaaaaaatacaagtattagccaggcatggttgtacatgtctgcagtcccagctacttgggaggctgggatgggaggactccctgaacctggagaagttgaggctgcagtgagccatgatcgtgccactgcactccagcgacagaatgagaccctgtctcaaaaaaaaagaaaagaaaagctatgtggtggccaggtgcggcggctcatgcctgtaatcccagcactatgggaggccgaggagggcagatcacttgaggtcaggagtttgagaccagcctggacaacatggtgaaaccctgtctccactgaaaaaacaaaaattagccaggcgtggtggcgcctgtaatctcagctactcgggaggctgaggcaggagaatcacttgaacccgggcagcggaggctgcagtgagccacgatgccgccactccagactgggtgctagaacaagactcagtctcaaaaataaaataaaataaaataaaataaaataagataaactaaaataaaataaaaaagttattgggtgttctttgcctattttgaagctacaagctgtaagaaaattacgagtaatatagaaataaaatcatggactttggtgttttgtctgaatatatgaatttgtccccaatcttttttactttcttttactttttcttttctttactttttttttttttttcttgagacggagttttgctcttgttgcccaggctggagtgcaatggcatgatcttggctcactgcaccttctgcctcctgggttcaagtgattcttctgcctcagcctcccgagtagctgggattacaggcatgcgccaccatgcccagctaattttgcatttttagtagagacagggtttctccatgtttgtcaggctggtctcaaactcctgacctcaggttatctgcctgagtgctggggttataggcgtgagccactgcacccggtttcttttactttttctttgagacagcgtctcattctgtcacccaggctgcagtgcagtagcgcaaattctgctcactgcagcctctgcctctggggctcaattgattctcccatatcagcctctggagtagctgggactacagacacgcaccactatgcctggctaatctttgtattttttgtagaggtagttttggcatgttacccaggctggtcttgaactcctgggctcaagtgatcctccttacatggcctcccaaagtgctgggattatggacttgagccacttcgcccaactttctttactttctttttttttttttttttttgagacagagtctttgtcgcccagactggagtgcagtggcacaatcttgactcactgcaaattctatctctcaggttcaactgattctcatgcctcagcctcccaagtagctgggactacaggcatgaggcaccacacctggccaatttttgtacatttggtagagacagggtctcaccgtgttggccaggctggtctcaaactcctgatctcagatgatccacttgcctcggcctcccaaagtgctgggattacaggcgtgcgccactgcacccaccctgattaagtatagtttactatgtttatttatcctcaaacattccaaagcttgaggatagccacccagaaacaccaattccaaatgtatagggtcaacattccaaaggggagcccaggcacgatggctcacgcctataatcccaacactgtgggaggctgaggtgggaggatcacttgagcccaggagtttgagaccagccttagcaacacagtgagacctggtctctacaaaaaataaaataattagttgagcgttgtcaactagtagtcccagctacttgggaggctgaggtgagaggaaggctgcagtgagccatgatcctgccactgcactccagcctgggtgtcaaaatgagatattgtctcaaaaacgaaagcaaaaacacacaaaaaaagcattccaaagtggagaagttacggtttcacttatataggcagagacatacaatccttacagtgacttgactagctataggatgctaccttccaaggaagattgctttattactctgtgaggggtgtacccgtctgaggaagtcttatctctgccctgtttggtcttagttatttctagggtaaaaggggcagaaggtacagctgctcgccatgtgattcatgctgcataaccacattcctctcaagtttcaggatcatttacaattccaacagcagctgggcgtggtggctggtgcctgtagtcccagtaccagggatgttgaggctggaggattgcctcagcccagtagtttgaggctgcagtgagctatgattgcatcactgcacaccaaccctgcctctaaaaaataataatatcaacaataaagttccaacagctttaagtttgaattatttaattccacaactcatttatcaacatatgttgcagataactcatggggagtttaaaatactcatagtattgtcacaggttataggtttttctgattacgtattgctgttaatgaattatcccatatctttttgttgctgttgttagagacagggtcttgctatgttgctcaggctggcctctgattcctgggctcaagtgatcctcctgtttcaccctcccaagtactgtcactaaacctggctaattgcttcatatcttttttattttttttttccccttagagacagggtctctatagacagagatcctctgtctatagaggatctatgagcaaggtggctcatgcctataatcccagcactttgggaggctgaggtgggtggatcacctgaggtgagaagtttgagaccagccttgccaacattgcgaaaccccgtctctactaaaaaaatacaaaaattagccaggtgtggtggcgcacgcctgtagtcccagctactcaggaggctgaggcaggagaatcgcttgaacccaggagttggaggttgcagtgagacgagatcgcaccattgcactccagcttgggcaacagagtgagactctgtctagacaaagaaaataaactaaaaaaaaaaaaaaaaaagaaaattacaattaaattacaattacaactggaaagcagttgggagatttcctgaagaacttaaaacagaactaccattagacccagcaatcccattactgggtatatacccaaaggaatataagttgttctaccataaagacaaatgcatgcatatattcattgaggcactactcacaatagcagagacatggaaccaacctacatgcccacaaatggtggactggataaagaaaatatggtccacatacaccatggaacactacacagccataaaaaaagaacaagactggccaggcgtggtggctcatgcctgtaatcccagcactttgggaggctaagatgggcggatcacgaggtcaggagatcgagaccatcctggttaacacggtgaaaccccgcctctactaaaaatacaaaaaattagctgggtgtggtggcaggcgcctgtagtgccagctactcgggaggctgaggcaagagaatggcgtgcctgggggacagagcgaactccgtctcaaaaaaaaaaaaaaaaagaaacaacaagaccatgtcctttgcagcaacatagatgcagctggaggccattatcctaaacaaactaatgcaggaacagaaaaccaaatactgcatgttctcacgtataagtgggagctaaacattgagcacacatggacataaagaagggaatgacaggtgccaggcgcagtggctcacgcctgtaataccagcattttgggaggccgaggcgggtggatcacttgaggtcaggagttcaagaccagcctggccaacatggtgaaacccagtctctactaaaaatacaaaaaaaaaaaaaaaaaaaaaaaaaaatggccgggtgcggtggctcacatctgtaatcccagcactttgggaggccaaggtggatggatcgcctgaggtggggagttcgagaccagcctgaccaacatggacaaaccccgtctctactaaaaaaaaaattacaaaattagccagacatagtggtgcatgcctgtaatcccacctactagggaggctgaggcaggagaatcgcttgaacccgggaggcggaggttgaggtgagccgagatcgtgccattgcactccagcctgggcaacaagagtgaaactctgtctcaagaaaaaaaaaaaaaaaaccaccacaacaaccaaccaaccaaacaaacaaaaatttagcagggcgtggtggggtggacgcttataatcccagctatcaggaggctgaggcaggagaatcacttgaatctgggaggcggaggttgcagtgagctgagatcgcggccactgcactccagcctgggcgacagagcgagactctgtctcaaaaaaaaaaaaaaaaaaaaagggaataacaccagggcctacttgagggtggacctacttgagggtggaaggtacgaggagggtgaggatcggaaaaactacctattgggtactatgcttattacctggggaggaaataatctgtaacccaaatcccttgcgacatgcaatttacctatataacaaacttgcacatgtacccctgaacccaaaataaaagtaaaaaataataataataaaaataaagcgaagccccacggggcgagcatgaaatctgggagctcagccatttccctggaggtggctgggtgggcggtgggagtggacggggctgggcagtgactgctgccaaggcagggggctggcgcgagggacgggggtagggggctgggcaggcatcggtgtcgcctcgcagggaacagttgggtggcttccagcttatgccaggagtctcctcctcacccgcacatcgcggggctaggatgggatgtcgtggctgccaaatcctccgaggcaactcctgcctgggacggcctaccacaggatgggcctgagaatccggagcgcaggctcgggccgctaggacaccttcccccgcccgcggacccagccttccagcatcaccggggttcgcggaggagaaagaggaaaggcgtttggcctgccaaggccgccgtagcgagggggcggggcccggaagagcaggatggcggcgcgggacagtgacagcgaagaagatctggtcagctatgggaccgggctggagcctctggaagaaggtgcgggccgcgtgggccggcggagcctgtggaaaacaggccaagggcccaggattcgggccacaaaagcacaagtcggtgctggaccattgttagatcgttcccagcgctgggaacacggcgacgagggaggcgttagccgcgctctcggggtgctcaccttctgcagcgacagagagaggtttacagggacgggagacacaagcgtggccgaacaagggggcggcgagatagaaacaagaaaatgacggaatagctagtgtgagagcggggggtgctcaggcagtgtcttccccgagagaggacgtttgagctcagacttgaaaccgaggaagaaaacaaccatgagcaaatctggagggaaagcatttcaggcagaaggaacataaagtggcaaaggccctgaagtgggagccagtttaggaaattgaggggcaggcaggacgggtatggttgcagcagatgacagcgggggagacaggtagaaaagaatgtcagaggggctgacaggggctggatcttacttggtagggtaaagagtttggatcttgtactaagtgcaggattagggttagggttagggtcatgggaaattacacagggagggatatatatatgatttttagagacagggttttgctctgtttcccaggctggtcttgaactcctgacttcaagtgatcctctcgcttctgcctcccaaagtgcagggattacaggcttgagccactgtgctcggccaatttttaatgttattctatctttgatgttgagaatacactggttggggatgggtaagagtgaagcagggagattagcaaaaagaggtcaggagatgatggtggcatggatgggacagcagtggtggtggtgtgtagtggtctgggtggagatatattttgaaagcagagctgaccatacttgctggtggaatgtgggggtgaggggcaagatgaatcaaggttctctcctgtgtttctggtctgttccacttaacgacttgacttgttcagcaagttatgtattgagtgtccagtaagggctgttggctgtgctagccctgtagggaaggcagaggaagaatggtggaatcattgggccacaatttatttgcagacctcctgttggtgggggtcccctcccttttttcaccctgaccacatcctgccaggttgattgtacttctgggatatctccacttatgccccctttatttcctacaaacagttctggtggaaacttctgctggatactggcccttcttctaccctcggcttacaaaaggttgagaaaggggccaggcacagtggttcacacctgtaatcccagcactctgggaggctgaggtgggaggattgcttgaggtcaggagtttgagaccagcctgggcattgtagtgagactctgtctgtaacaaacaaacaaacaaacgaaacaaaaggctgagaaaggctagtcttccgaatgctttttatgtgtttgaagtcagctgttgcattttcttaagacatctctgttctacactcactatcccaagttctttttttatagagacagggtcttgctgtgttgaccatgctggtttcaaactcctgacctcaagcgatgctctcaccttggcttcccaaagtgctggattgcatgcatgagccacagtgcccaacattttttattttaaaaatagagatgaggccgggcgtggtggctcacgcctgtaatcccagcactttgggaggccgaggcgggcagatcgcgaattcagaagatcctaaccatcctggctaacacggtgaaaccccgtctctactaaaaatacaaaaaaaaattagctgggcgtggtgggggggggctcatgtagtcccagctactcgggaggctgaggcgggagaatggcgtgagactgggaggcagagcttgcagtgagccaagatggcgccactgcactccagcctgggcgacagagcgagactctgtctcaaaaaaaaaaaaaaaaaaaatagagatgggatccttctatgttgctcaggctggtcttgaactcctggcctcaagtagtcttcccagctcagcttcttaaagtgttggaattataggcgtgactctctacgcctggccccaaccatgtttttgttttttttttttttctgtgacagagtcacgctctgttgtccaggctggagtgcagtggcgcgatctcggctcactgcaacctccgccttccaggttcaagcgattctcctgcctcagcctctcaagtagctgggattataggtacattccactacgcctggctaatttttgtatttttagtagagacagggtttcgccatattggccaggctggtcttgaagtccttaggtcaagcaatccatctgccttcacctcccaaagtgttggaattacaggcgtgagccattgcatgtggcccccaaccttgcttttgaagtggaaggaaaggacatggatttgtagactttgtttttctggactaaaaacattctttaacttctcagtaatacaagtttttgaggattgattcattgtcttctaagcacttttttttgagagtttcgctcttgtcacccaggctggcatgcaatggtgcgatctcggctcactacaacctctgcctcccaggttcaagagattctccagcctcagcctcccgagtggctgggattataggtgcccaccaccatgcccggctaatttttatatttttagtagacacagggttttaccacgttggccaggctggactcgaacttctgacctcaggtgatctgcctgcctcggcctcccaaagtgctgggattacaggcgtgagccaccatgcccagccagttttctaagcactttgaaatttaaatgcactctgtctgtattttacgatataacacactagactaataattatttttactccctgctttgaagttttagtgacaggttagacaggcattggtagaggagaactccattttaattaaagttgctggccctgacagaaaggtttattagttaagagttaaccagggagcctagtgacagtggctgaactttatagacacataggccttctaatctggaaagaagggggccagatacttacctattctttccttagacacttccacttggttctagaattcttatctacagctcattctatacccagattaattttagggccaattttctcctccttgatgctgtgactctcacacttaaaactaaccgtggcttccctcgcccccaggacacactataaaccctgcagcactatgttcaaggccccctgcactgtccgcctttctggttccatcttccgctcattccttggcctcccgttagactggactttctcaatacacctgaccttgccctttttttttttttctttttttttttgagatggagtcttgctctgcctcccaggctggagtgcaatggcacgatctttgctcactgcaaccaccgcctcccaggttcaagcgattctcctgcctcagcctcttgagtagctgagcttacaggcgcatgccaccacgcccggctaatttttgtatttttagtagaggcggggtttcacaatgttggccaggctggtcttgaactcctgacctcaggtgatccgcccgcctcggcctcccaaagtgctggaattacaggcgtgggccactgtgcccagcgactttgcccttttatccctccttctgtttactggtgggagtcagtggctctgtgtccctatctgcagctatcaaaattctgcttattcctaacggtggctgatgttgcagaccttctcattgtcagaagtgctccagtacgtgcaggtcttctctgctgggctcggagtgtcctgagaacgggagcagagttttgttcagttttctataccccagctctagaagggctgcttgcatggcaaggccctcatcaactttttgtttttgtttttgagacagtcttgctttatcccccaggcgggagtacagtggcatgattatggctcactgcagccttggcctcctgggctcaagcgatcctcccagctcagcaccccccagcccccagtaaccaggactataggcgcataccaccatgcccggctaattttaaacattgcgtcactatgttgcccaggtttgtctcaaaccactgcttctaatgactcgaaccactcctacctgggcctctcaaagtgctgggattacaggtgtgagccactgcacctgactcccccaccctttaaaaaaaatgtaaccattagccaaccaggggctcgttgaaattttggtcagggaatgagaggaaggaacagtataggaggcatctctggcttggagacagagctgagatctggtttcacctttgtgcttattagcagtgagtctcagggaagttacttaatcagtatccttatcagggtatgataaatgagatgatatgtactaaaggaaggaattagttgtcattagtagcagtaattaggacatggcctggctaaaatgccacccacctcctttctggagttgttccgtcactggttagaggtggtgccttctgctcaggagacctgtgggagctagttggccacattgcttggccctcatcatctgccgccacaggttgcactcagttgtctgcagatcttatctcccctttgagatcagaagcaccaagaatagcaccaagcactggcagcacctgttccctcttaccgtagcccagtgggacagttggcaatgcctggagacctttttggttgtcatgcctgtggggcataagctgctgctataggcccaggatgctgctgaacatcctgcaatgtacagaacattcccctgcaacaaagaattctccagcacaaaatatgctgagattgagaagctctgccatagccaagaatgatgccaagtgcatatatgtaatgtagtgtgtgtactgcatttccatgaaatggtgaacatcttgggttgtgggacccaagttgtaatttagtcctttagagggaaaagacattgtagctgatattaactgatttcccccatggccagggactgtgctcagctgtttacgtatgatatttaatcctcgttaccaccctacaaagatgggcttctttattaccttgattttacagttgtggaggctgaggcttagagtgatgaagtaacttgttcaagatgacaaattttttttctttttttgagacagaatctcactctgtcacccaggctagagtgcaatggcatgatcttggctcactgcaacctcctcctcctaggttcaagcgattcatctgcctcagcctcccgagtagttctgcctgccaccatgcctggctaattttttgtatcttagcagagacggggtttcaccctgttggccaggctgttctcaaactcctgacctcaggtgatccacccgcctcagcctctcaaagtgctgggattacaggcatgagtcattgcgccaggctgatgacaaatcttaacaagtagtagaaggggatttgaattcagatctctaggtctttaaacctgggctcttggctggacgcggtcgctcacacctgtaatcccagctacttgggaggctgaggcaggagaaccacttgagcccaggaagcagaagttgcagtgagccaagatcatgccactgcactccagcatgggtgacagagactgcatctcaaaaaaaaaaaataaataaagtatttcttgtgtctccctcttcttgttaagtacttcataggcatttaatttgcataacaactccatgaaatagctgttaccattaatgccatttctattttacagataagtaaattgaggcacagagagtcaaggctgaccaaagtccagcactagtaaagggagttggcttgaaactccactgtgactctcacccttaactcatacccttaaccactgtataacctacttcctcttgtgaacttttgaaaataacttgattttttttattttttaaaaaaatttaaataaattcaggattttgaattgtagttgataaaacgaggcagtaatttgtgccatagtacctgggagtttaaacctaaggaattgttaggctaggcctaaaatgtattagattaaattcccttgcttgtgtgatgtctcaacccagccctttcaacaaagtaggaaaaggaataggtttaaagaacactgtggaatcaggagattcacagaaattaaggaaactcttaggagtcggggaaaataggcaataccaaaggaaaaatgccggattcagggatggtgtgacgttctagaagaggtatggaagtgtatctctccttgccaagtgccaccccagcttctgcgcccttcatttgaagccaggagatttcagtttcatctgtcggaactctcctgacattataatttttttttttttttttgggggagaagtctcgctgtgtctcccatgctggagtgcagtggtgtgatctcggctcactgcaacctccacctctcgggttcaagcgattctcctgcctcagcctcctaagtagctgggattacagacgtctgccaccacgcccggttaatttttgtatttgttagtagagccgggattttgccatgttgaccaggttttgtaatggaatttagtgggaaaagagggcaatcattattacataagcttataaaatatattgttttctaggctatataaagcagtaaagtctaggaataacaatttaaatgattatatttgaattataagaagtaaacaatttatgatatttaaaaagtgacattttccctaaatttgaaccgaccatctcctctctttttcatttaaaaaactttttttttttttttttttaggtgaaagaccaaagaaaccaatccctcttcaggatcagactgtcagagatgaaaaaggaaggtataaacgattccacggggcctttagtggaggtttctctgctggatacttcaatactgttggctcaaaagaaggtatcattttcctaattgtagctattataccattaaagcaaatgatcaaaatattgattctccctcacccttgctttttttttttttaattttgagacaagagtctcgctctgtcgcccaggctggagtgctgttgtgtgatcttggcttactgcaacctccgcctcctggattaagcgattctcctgcctcagccttccaattagctgggataacaggcgcatgccactatgcctggctaatttaaaaaaaaatacttttagtagagacaggagtttcaccatgttggccaggctggtctcaaagtcttgaccttgagtgatctgcccaccttggcctccaaaagtgctgggattgcaggtgtgagccactgcacccggccacctttgcttttttttttttttttgcgatggagtcttgcactgttgcccaggctggagggcagtggtgtgatcttggctcactgcaacctccgcctcccgggttcaagcgattctcctgcctcagcctcccaagtaggtggaattacaggcgcctgccaccatgcccagctaattttttttgtgtttatagagacagggtttcactatgttggccagtgtggtctctaactcctggcctcaagtgatccgcctgtcttggcctcccaaagtgctgggattacaggtgtgagccactgcgctcagctttctctgaacatacactgtaacctcttgtgttctttggatatttggatgtttccagagtcaacttgtatcttgttcattgattgcaaccttatggttaaagagttttctttcactttgtaaaaaaatgcatacctcctaatcagatgattaaatgataataatgactttggtttttattgtgtcttgccattcacgaaatactcttaaacagagtctttcagttaatcattgactgtctctcgtgactgagtgagtgaggagggcaggtgtcacagggatcttgcagatgatgccaccaagggtcagagaggttaaggagccagcatggcgttagtgctgagggaagagtcaccaggtgccctcttcagacactggggaccacagcaagactggctcctcagtgctctctacctggggaaaagtcagttaaatcttttatgttatgtacttttataaatgccaagttgtttaaagtattgtatgttttaagatatattaatctagaagcatttttttgaactggaagaaatggctttctatatctcagttatgaatggaagatgaactgattttattatatgtgctgccatagtgagcacggaagatgaactgattaattcacatagcaattatcaagaaaaagatgggctagatcttttataatttttttttttttttcctgagatgtagtctcactctgtcgcccaggctggagtgcaatggcatgacctcggctcacttcaacctccgcctcctgggttcaagcaattctcctgcctcagcctcccgagtagctaggactacaggtgcccgccaccacacccggctgatttttgtattttagtagagatggggtttcaccatgttgttcaggctggtctcgaactcctgacctcaagtgttccacccgcctcagcttccccaagtgctgggattacaggcgtgagccaccatgcccggccttaccattttatttaattaattgatttattttttgagacagggtctcactctgtcgcccaggctttagtgcagtggtgcacctactgagagtagaccttccccagatgcctcagctcacagggcccttggagagaatcaggaaggaggtgcaaccctcttagagaaaactaaacaactttatgtgcagaggttacagacatatgtgacctccagagcattccctgtttgtggacgtggcacatgctcggtaaccgtggtcagggaacaaggccattggttacaggattccagtgtctgttgaaactgggggactggcagagccgctgcccttggacctgccaggttgagtctttggtcagggtactgtgaatgttgcctggattccttctgttactctctctttatccactctgactgattaaaacaccttgacatcatatctttacacttgatcttagccaaaaggcctagaagcgatgacatcatttctttagatatgttaatatgccagtggaggttgctggtctcacgtcctgcattttaaggtgaccttgcatctgtcagctcagatctgcttgtgttcatttcacagtttaactttcaatgtgtaattctatatctcttggtttcactttcttatggggaaaccttaatgtatccactaagttttacatcaggggatacagggattaataagaaatttatgtggaataattacgtctatataagcactgagatgggaagtagctaagagtttatagttattgggaatttcaagtccatacatgttatttaatcatttactcatagacccaaatactctctaggattgtaaagttctaaactctttttttttcaggatggacaccctctacctttgtgtcttcacgacagaacagagcagacaaatctgttcttggtcctgaagattttatggatgaagaggtgcgtgtgcaaaactttaattgccaattagctggtgggacaggtctagttggttgctgtaactgccttctctctccccagaaggtccaatgtacgatttcctctttgtttgtaaggctttatcttttaggtatttgatgtgcagtgtcctgtacatcagtagagtcttgttcattggaggagcattttatactggggccaatttctaaaatcaagagtgtaaggggaaagtcatatacaggcaatttacttgaaaagcctcgtggctgggtgcggtggctcacgcctgtaatcccagcactttgggaggccgagacaggcggatcacgaggtcaggagatcaagaccatcctggctaacacggtgaaaccccgtctctactaaacaaaatacaaaaaattagccgggtgtggtggcgggtgcctgtagtcccagctactcgggaggctgaggcaggagaatggcgtgaacccaggaggcagagcttgcagtgagctgagattgcgccactgcactccagcctgggcgacagagcaagactccgtctcaaaaaaaaaaaaaaaaaaaaaaaaagtaaagcctctattgcctcaaaagctcagtatccatggtgctgggtctgcagctttccacagtaactctcaggcacactgcagtaaagaactgtgagtgactgaactaaaattaaacttctgctaccttaaaacctggtcgcggattcacccatgataaagattaaatagggagggagagcatcaggaagaatagctaatgcatgctgggcttaatacctaggtgatgggttgatctgtgcagcaaacctccatgacacacatttacctgtgtaacaaacctgcacatcctgcacatgtaccctggaacttaaaagttgaaggaaaaaaaagattaaataaaacatttatatcagcatgtgcgaggctgcaggtaagagggaaggaagtctcattctttttttgagtagcatcatctagaaggaaacatatctcatgtagcaagaagtctagatgtgctgagaccccaggctctctcttctcagtcttctgttggcagcttgtccttatactacctctcctcatgattgcaaaatggctgtagtagttccaggtggcacatccaggatgacgttgttcaagagaactttcctcttggtcccttttcttttcttttttttttttcctgagacggagttttgctctgttgcccaggctggagtgcagtggcgctatctcggctcactgcaacctctgcttgccaggttcaagtgattctcctgcctcagcttcccccgagtagctgggattacaggcgtgtgcaccaccatgcctggctaatttttgtatttttagtagagacggggtttcaccatattggccaggctggtctcggactcctgacctcaggtgatccacccacctcggcctcccaaagtgctgggattacaggtgtgagccaccgcacccggcagtctcttttcttaaaagcaaagtagcctttcatatgagtcctaccatgaattttctctacatttgcttgcacaaattgttttacatgcccattcctaacgcagtccctggcaaggaaagtgggatcaaaatgactggcttagataagacacaaagccccacttcataatcctgcctccccaacactgggagtaccactcctgcaatgtgtggcggtgcagaggaaggcaggtgcctagacaacgtcaggactctgcaaggaaagaggaaacgtgccaatggttggacaggcagccagcaacatctgctccagtaaaggcaaaggcacctgactctaggcctggcactcacacttgtgaatgcttgctggctggaactccaggctttgtctctttcacgctgacctttgagatactgtcgagaagaacacggccattacttcctgtcttcccagcttggtcatgctcggggtggccctaatgagcagcgactatcatgccctgcccttggccactggctttaccttgtgtgaggatgaggttctaaagtcagtgtgaggcggggcacggtggctcatgcctgtaatcccagcactttgggaggctgaggcgggtggatcacctgaggtcaggagttcgagaccagcctgaccaacatagtgaaaccccatctatactaaaaacaaacagctagccaggcatggtggtgtgtgcctgtaatcccagctacttgggaggctgaggcaggagaatcacttgaacccgggaggcggaggttgcagtgagcccagattgcaccactgcactccggcctgggcaacaagagagaaactctgtctcaaaaaaataaataaataaaaaataaagtcagtgtgtatgtctgtcactctgctgatccagaactaaattttgtagttttaactttttttttttaacagaaataaaactatgtgatgtattgtgtatagtcactttccaaataatgtaattctgtttgaatttttttgaaggatcttagtgaatttgggatagcacctaaagcgattgtcaccacagacgattttgcctccaaaaccaaagacagaatacgagaaaaggctaggcagttggccgctgctactgcccctattcctggagccaccctccttgatgacctcataacgccagcaaagtgagcatttccttctgactgtcatgatcttagcaccggtgttttgcatatgtgtgattctcttgctgagggatagtttgattgcaagtgagacaagccttcttaggctcaaagtctaagtgaaaaagggggttttgcgtaaaggatcttgcactgtcattgcacggagagattaagaactccagccactagctgtgctgctggggctctcagaggctggagagctgttaggaattacagtgacttctcccaccacccctccagaccttatagcctcgcctctgtctgcctccttctaccctcactttctgtgtatctccttgtgctcctgggcttgtggcctgatatggcagccttagaccttcagggattcccaggccacatgcttagcaaagactgtctagagtccctgtgatcccatcgtaaaggcccaggagaaaggtcatctgattgacttccccagttcaggtgtgcaccccagtgcagcctgctgtggctggaatggcagggtcacgccagatgtaatgtgggtgagggcaagggcccaggcaagacaggcctaggaactgagcaggaactcagaagccgcttatttcatattctttgttaatgttattttgaaaagttcattttcaatgccttgctatcctagattatctgttggtttcgaattgctaagaaaaatgggttggaaagaaggacaaggagttggtcctcgagtaaagagacggccacgccgacagaaacctggtgtgtatgttaattgattaactgttatcactgctgcagcgtactttttttttttttttgagacagggtcttgctctgtcgcccaggctggagtgcagtggtgcgatcccggcatactgcagccttgacctcccgggctcaagtgatccttccacgttagccccgcaagtagctgggaccacaggcatgtgccactgcgccaggctaattttttgtattttttgtagagacggggttttgccatgttgcccaggcccaggctgaggattgcctgagcaaattccaataaacgaaatagctgggcccagtggtatgtgtgtcttctaaggctttttatgtgtaatgcatgacagcttccagaaaggctgtgctagtttatgcttctgccagcagcatgtgagagttcatgtttcctaccctcccccaagctgtcacagtttaacattattacttgttccttatttcttgccctgagtctccccagccagactgtaagtgactctttgagggtaacagtcatttcttttgggttccttatgctgtggggcagtattggttactcattgagcacattactgctaggtagggcaggtgctggtagaaaatgattcctggctgggtgcagtgactcatacccataatcctggcactttgggatgctgaggtgagattatctttgagcccaggtgtttgagaccagcctgggcaacacggtgaaaccctgcctctaccaaatataccaaaattagccaggtgtggtggagcgcacctgtagtcccagctacgactcaggagagtgaggtgggaggatggctttagtccagaaggttgaggctacagtgagctatgatcatgccactgtacttcagcctgggtgacagggcgagaccctgtttctaaaacaattcccagttatcttcctctcaccgtaatgctgtagcacattttataaatgtacccatgtacctctgaagagttatcagtgaggtttttttttttttttttttttttgagatggagtttcgctcttgttgcccaggctgaagtacaatgcgcgatctcggctcactgcaacctctgcttcccggttcaagcgattctcctgcctcagcctcctgagtagctgggattacaggcttgcgccaccatgcctggctattttttttgtattttttgtagagacggggtttctccatgttggtcaggctggtctccaactcccgaccttgtgatccaccccgcctcagcctcccaaagtactgggattacaggcatgagccgctgcgcccagcctttttttttttaaattttttgtggaggcggaatctcactatgttacccaggctggtcttgaactcctgggctcaagcgatcctctcacctcagcctcccagagtgctgggattacaggtgtgatccaccgcgcccggcctggtcggggttttctatttgtagtcactcatgactattgcatttgaaatctcttttctagatcctggagtcaaaatctatggctgtgcattaccccctggaagctcggaaggatctgaggtattgcatggtgtgactgaccttcactttggtacaacagcacctgtttctgtatgactgtgaaatttggttggagacaattttagaaatcagatccaataactatacagttaaatactcataccctaaagctatcctcattatatcagcatacatattcagcaacatgccagcaccacagatacccaggtctgttcagcttcataaaatggagttggtgttagcatcctttgtgccagaaagtgatttagtcatttataacagcaccaatgaaagtttgctaattgttctgtgtggcattaatcactgcgttttcaattagtattttgtgggtttactttgcatccttcagtgactcaccttaattccactttaaacggaaatagggtgaagatgatgactacttgcctgataatgtgacctttgcacccaaagatgtcacacctgtggatttcacacctaaagataatgtgcatggtctagcttacaagggcctggatccccaccaggcactgtttggaacttcgggagaacattttaatcttttcagtggtggttctgagagagctggcgatcttggagaaattggactgaataaaggaagaaaattgggaatttcaggccaggtaaaattattttctattttataaagggggagtcattgataaatgagtctactttctttctttcttctttttagaggttctttattttctttttttttccccctaatcctcaagtggaatcaggtcaaagattctttcttaaaatgcatttttaaaatggtgactttgccatttcattattaccatttctgtttttttttgagacggggtttcgctctgttacccaggctggagtgcagtggtgcgatcttggcttactgcaacctctgtctcctgggttcaagtgattctcctgcctcagcctcctgaatagctgggattataggcatgtgccaccatgccccactaatttttgtatttttagtagagacggggtttcaccatgttggccaggctggtctcgaactcctgacttcagatgatccacctgcctcggcctcccaaagtgctaggattacaggcatgagccactgcgcctggccaccttttctttctttctttctttcttttttttttgagacagagtttgactcttgttgcccaggctggagtgcaatggcgcgatctcggctcaccgcaacctccacctcccgggttgaagcgattctcctgcctcagccacctgactagctgagattacaggcatgcgccaccaccccggctaattttgtatttttagtagagatggggtttctccatgttggtcaggctggtcttgaactcctgacctcaggtgatccacccgcctcggcctcccaaagtgctgggattacaggcgtgagccactgcgcccggcccaccttttctttttataaacgtgtttttttttcagtcttttaaacaaaaatgctacttgttagaggctcctttccgcagagagtaggagttcttccagcgggcagtagagtagcagcggcccttagaccccagccaccagcgttggcccaggccgcattgatcagttgatgaacatttcttcctttctcctcttggaagccacatttccacccctgcactgctgcttggctttgttctccactcctcttcctgtgctgggacctggagccatggctgttgtggggactggagggcagtgttggcagtagggacatggcattcacctctggtcactgttttccagaaaacttgtgtgtgtgttggtcgatctgggacccccgttcacttctctcttggtgatcttgaagtgctaacatggtttccaatcacatccttaaagtagctttatccctgaagatcccagacataccctaacacctgtgctcagtttgaaaccttgtttttttaaaggcttttggtgtaggtgccctggaagaggaagatgatgatatctatgccacagaaactctatccaagtatgacactgttctgaaggacgaggagcctggagacggactctatggctggacagcacccaggcagtataaaaaccagaaaggtaattcgacagccacaaacctaatggcaggaccaagtgtcagggtatcaggaaggaggggctgcaagagcgatacaggagcaccagcctctgttgttggtcaaagtcacggtaagaaacaaaacaaagaagcgaggcccagcatgggaagtgaaacaaatgcaggattcagacctggccaaggccaaagccagctgtcaaggtggggcccaggtgggagggagggagaggtctgtaatcagggaaagaggaatgcctggaccagtgaccacatggctggtcagagctggcagtgggtcaaagggaagcacccagagctcgaggaactgggcaggtggccaaaggaggccaacacatgcagcaggtcagaaggtcaagccaggggaccaggaggcaggtacaccaacagcctgcagcaagatggagctgggcgcccagtccgtcttctcccttgagtccctggctctgaggaggctcttgttgggataagaggctgacatctctcaacacaactttaacttcatgctgtgttgaaatttcaaggtgaatcagatcctgtggtttgaagtcacatttcagttgtttccagaaaaggtgcagggccagacagtgtagagtcggtattagcagcatgtgatttggagtcagtcagacctgggtttggatgccagctctccattgcccagctttgtgaccttaggcaaggctcataacctctctgggcattggagtccacatttgtaaagtgaggataaaatccactccagaggtggttgtgaggattaagtggcataactcagtgtctggcaaagcacctgtcccaaagactgaagaagtggcacctactattctttggttatcatacagtcatgtgtcacttgactgggatggtatgacagggaacccagggttttacacaggacactggaagggcatgtgtacccagtgttaggagacttaacctccgggtggtcagtgggctgctagtacttacttccttttttttttccttccaatgtttttctttttttttcccctgagtcatttagcttctgagccttcttccttttgcctccctatagtttctgatttctgtccccaaactatggattatttttatataacttaaatgaagatatattaatatatcataatatactatttaattttaatactatattataatcaatataccattatatattgtatatgatttatattttatataattaatatatcaatactattggtatattatgtaacataccaatacattattacatagtaatgtattgatctattttaattattcattatttattaaaagtggtgggagtatgaaattgataatatcctatatctgttaatataaatgatatttaatatacaacatattaataacaatatatcaatcctttaataattaatgatatgtaatgacatatatttaagtccgcctgctgaaccacatctttcacttttccctcgtgcaccagctttgcccccagctgattggttctcactccttccactgagctccgagcctgtccttgtccctctctgctgtggcctctctcccccagcttcctctctccccccctgcagggtcacagcatctgtagttttgactgtatgattttctattcggtgaatctatctttattttacctagtctccacggttgattttttacatttttaaattttttttttttgagacagagtctcactctgtcacccaggctggagagcagtggcatgatctcggctcactgcaacctccgtcccccgggttcaagcgattctcttgcctcagcctcctgagtaactgggattacaggtgtgcaccaccacgcccagctaatttttttttttttttttttttgaagaaggaatttccctcttgttgcccaggctggagtgtaatggcctgatcttggctcaccacagcctatgcctcccgggttcaagcaattctcctgcctcagcctcccaaggagctgggattacaggcgcctgctaccacgcccagctaatttttgtgtttttagtagagatggagtttcatcatgttggccaggctggtcttgaactcccgacctcaggtgatccgcccgcctcggcctcccagagtgctggaattacaggcgtgagctaccatggctggccatggttgatttttaaattctcattttttttttccatgatcaatagggctataatgaatatttttctgattctgtctttatgtacatttgtttatttcttcagaattcttcagaatgaactcataaacatgaaatttctgggttttgagataatacaagttccaagaatgtgaaattgaatcccacattacctgaagaaattttagtaagttctagaagctttaaaaaaagcccaacatgccaggtgcattggcttacacctgtaatcccagcactttgggaggctgaggcaggcagatcacgaggtcaggagatcgagaccatcctggccaacatggtaaaacctcgtctctactaaaaatacaaaaattagctgggtgtggtggcacatgcctgtaatgccagctactcgggaggctgaggcacgagaatcacttgaacccaggaggcagaggttgcagtgagccaagattgtgccactgtactctagcctggtgacagagcgagactccatctcaaaaaaaaaaaaaaaaaaaaaaagcccaacaggagtcaaagcacaaagaatggttttgtggggaggggagagatgtggtggtgctgaatgatgagtggctaaaagccttagctcatctgcactgcttgctgttcctgcttcaggcctgagctcctagcctgtgaaagagcttttgatggtcatgtagaaggggctttttttttttttcagaaggggcttttgagtgcagagaatacagttcatttatacggacttttggcgtaaccagtacgtgcaggaaaaccttgagaatcaaatcaaagagcttttgttggtggggttgtctctatgaccagaagacgatccccacctccaggtcagagggcattggtcattcagtttcctatgtctgtgatctttatgtcttgttaaagattacaggctgacctggtggcattgcctttcatccctatttggattgttgctaaggagatggccaggtagtcaccctgtagttcttcacctagttttacacatgacgctctcacagttgtgatttgtattttcctccatgcttgtccttttggtggtttttcttgatcttttactccacggggtatatcctttggtgcccctaaggtacttcttctaaaaatcacgtcaatatgcttgtcttggaggaccacagccttgtgacctgggtagcccaatctgtccagggcggtgtgggccgggccttagtcactgagtcaacagaggtgtggggctttgcttaccacttgttcttccctttactgctgctgttgagtgatagcatgtatgacacgtactatttatgttcttagagataagaacgtaaaatgctgatgtgttctgtcttattctaatcatctctacttctggaattaatctatgacatcattttgtagaatcagagaaagaccttcggtacgttggcaaaattttggatggattttccttggcttctaaacctttatcttctaagaaagtaagaaaaactttttttctttctttttttactggtttagttcttaaaatatttgctgctatgtgatctgagttctattaacaacaggaaagataagtaaattctgttttcaaaaaacaacagcctggttactagtgattgtctagaaaaacattctacattagaaataccagggcgaggcgcagtggctcatacctgtaatcccagcactttgggaggccaaggtgggtggatcacctgaggtcgggagtttaagaccagcctgaccaacatggagaaaccccgtctctactaaaaatacaaaattagccgcacgtggtgtcgcatgcctgtaatcccagctactagggaggctgaggtgggagaatcacttgaacccaggaggtggaggttacagtgagccaagatcacaccactgcactccagcctggacaacacgtaaaactctgtctcaaaaaaaaaaaaaaaaaatcagttggccaggcgtggtggctcacgcctgtaatcccagcactttgggaggccaaggttggcagatcacctgaggttaggagtttgagaccaccctggtcaatatggcaaaaccccatctctactaaaaatacaaaaattagctaggtgtggtggtgggcgcctgtaatcccagttactcgggaggctgaggcagggagaattgcttgaacctgggtggcagaggttgcagcgagccaagatcgcaccattgcactccagcttgggcgacaagagcaaaactccgtatcgaaaagaaaagaaaagaaatatcagtcagtagctacattgtgataaaaatatctaatttctatttttttttttttttttgagatggagtcttgttctgtcacccaggctgcagtgtagtgatgcaatctcagctcaccgcaacctccgcctcccaaattcaagcgattctcctgcctcatcctcctgagtagctgggattacaggcgtgcaccaccacggctggctaatctttgtatttttagtagagatggggtttcaccatgttggtcaggctggtcttgaactcctgaccttgtgatccgcctgcctcagcctcccaaagtgctggaattacaggcgtgagccaccgcgcccggccgctaatatttcaaattcaaacttcaagtgagtggttatttacatgaaaagagacatacattagaaagagaatgaaattgctatgattctaggggaaatgtaggttaaggaaaagtagaaaacattcagaaagctggataacccatagccctggttcctccccatgctctgaagctagcaggggcaaggttccctggcctcctcagctggggccgagcagaagggagagaagccgtgtgcaggtgggtgaagttggaggagagctctgcgtgcctttgcagattgctttgtttttgtgagatgctgtcacagccacatgtgaagctcttaggccacatggcgctcttcctgtcaccaccaaagtcacatgctcacaggcacactcaggagggagttagggtgctggccagcccaggaggggtgtctggccatctgccttgtcagcattcctgttttagattgtttcacgctttaatcagctttttgttttttattcagcaaacatttgttcagtacctctaaggattggcctgtgcttgtctgggacacgggaggccaggggacagttttgatttgtttcattgtgatagttcatgtgttgtgatagccagcagaatatatctaggacagtgtcgggcatacagtaagctgctattattaccagaaatgtcaaataacattaaaggaaaatgcaggtgttttacatgtatgaaaaggaagcataaggccgggcacggtggctcacacctataatcccaacactttgggaggctgaggcggatggatcacttgaggtcaggagttcgagaccaacctggccaacatggcgaaaccccacctctactaaaaatacaaaaattagccaggcatggtggtacgtgtctgtaaacccagctacttgggaggctgaggcaggagaattacttgagcctggaaggtggaggttgcagtgagccaagattgtgccactgcacgtctagcctgggtgacagagcaagactccatctcaaaaaaagaaaaaaaaagaaaaggaagcatagtttaaaaatgatggagaagcactcactggtccttaggataaataggccagcctggccccaggtagctcccatccaacaaaggtagcagatacacaaatacagagtcgtgggcaaacatccctaagtggagagacacagtcctgggggttcctggcgcttctctggagtagggctttgggcaggaacacttcagaggagggctgtgttcatctagcctttcacacacagatttagatggttctctagatctgaatctagaggtcaaacagaacaatgatttggcagacagacagagagaaatactttcaatccaagactgggcatggtggcttacgcctgtaatcctagcactttgggaggccaatgcgggcagatcgctagagtccaggagtttgagaccagcctgggcaacatggtgaaaccccatctctacaaaaaatacaaaaaaaaaaaaaaattagctgggtgtggtggtatgtgcctgtagtcctagcctcttgggggcctgaggtgggaggattgcttgagcctgggaggtccaggctgcagtgagctgtgattggctgctgcactccagcctgggcaacagagtgagaccctgtctcaaaaaaaagaaagaaatactttgaatcccatggaggatatagagaagttgtggacacactcctcctttctgccatgttcctctgggtttttgtgtggtggtaacatgagagtgttttctggctgatttgggggtgtgtctccagaaggtgatgaagctaagatgataaaaaaacaggatttcttgacaatgataacaccactctttcatggactttcattgtgccaggggcttgacccaggctgtgtattttaacaaccacctggggagcttggggaactccagttatagcagactctctggggtggggcgcaggcatcagtatagttacaactcctcaggcgagtccagcatgcacctggacctgagagccagcggagagaggggccgggagagaggggtcagtgctttcagccacagggttacttcatcatggacttcagctttcatgtagcttaaaaatctagagaatatttcagtgtgaatttgggggaaaaaaatagtaaagaaaagtctagaaaatagcttaaataacaaacacgtgtggatttgttagaccaagagcaagggagaccatttaatgcagttatttaacaatatttagtactttcctttaccttgtctgctgtgccatcattcatgcctgtcagtgttaaaaatccccaaatttcccaaacagattttcatttcacttccgtcaacttttaaattaaagtttttaaattcctgtccccactcccctcctagctcctgggccaggtcctcttggctctactcacattattcatagtaatatcttggatgaaaaaataggccaggcgtggtggcttacgcctgtaattccagcacattgggaggctgaggcgggtggatcatttgaggtcaggagtttgagaccagcctggccaacatggtgaaaccccgtctctactaaaaatacaaaaattagccaggcatggtgatgcgtgcctgtaattcctgctacttgggaggctgaggcaggagaattgcatacccagagctgagattgcaccactgcactgcagcctggatgacagagcaagactctgtctcaaaaaaaaaaaaaaaaagaaaaagaaaaaagaaagcccgaagcttcaatttgcaactgaaacataactagaaaaaataattatgaatttaaaaataactacagttattattattattaattattatttttgagatggagtctcactctgtcacccaggctggagtgcagtggtgcgatctcagctcactgcaacctctgcttcccaggctcaagcaattctcctgcctcagccttccaagtagctgggattacaggcatccaccaccacacctggctaatttttgtatttttagtagagacggggtttcaccatgttggccaggctggtcttgaactcttgaccttaagtgatctgcctaccttgtcctcccaaagtgctgggattataggcatgagccactgtgcccagctattattattatttatttgtctttcttttttttttgtttgagacggagtctcgctctgtttcagctctgcaccggggtgcagtggcgcaatctcagctcactgcgacctctgcctcccgggtttacgcgactctcctgcctcagcacccccgagtagctgagattacaggtgtgcgctaccacgcctggctaatttttgtatttttagtagagatggggtttcaccatattggccaggctggtcttgaactcctgatctcaggtgatccacccgccttggtctcccaacatgctgggattacaggcatgatccactgttcccggccccaactattatttaaaaaaattttttttttagttttatagagatggggtctcattctgttgcccaggctcgtcatgaactcccaggctcaagcagtcctcccatcttggcctcccagagtgctgggattataggtgtgagccactgcgcccagccattattttcctccatgctttgaatggtactttttctaaattttctgatgtacagtgggccagccctacctgtaggccctgacatttatgatctattgtcatctttatagttcttatcctataaaacaggcacattagcttctttctgtagaaatgggtgggaggatattcgaaatgcctgaccactggaacacggtggctcttgtgaccctccaggtccagaggggatgctggctggacctctggccagcctgttcttgtgctacctgcctgctgagtgttaacccgggaaggggcggggttaacaaggctcagaggtaacaggttttcctgattaaatcaaacatgatcttgcagcctgtattttctgggttttgtcttggtttgttaagatctatccacctccagagctgccaagagactatcgaccagtgcattatttcagacccatggtggccgccacctccgagaactcacacttactgcaggtattatcagagtcagctggaaaggcaacgcctgacccagggacacacagtaagcaccaactgaatgcctccaaacgggctgagttgcttggagagacgcctattcaaggtatgtgccatggagaagacggaaatcatttcacataattcgagttatcaaaatcaaaatggaaagttgttgttttcccactgaagttttttacatgaatttgtattcccaaactgtggaaataccactatttattgtaaatggcatacataatagtgtgcatatcttttacttctttttttaagttttatttttaaacttatttattttgagataatgtctaggtctgtcacccaggctgaaggcagtggtaactctctataacctggaactcctgggttcaagcgttcctcccacctcagactcccatgttgctgggactataggcatgtgccaccaccacacctggcacattttttaaatagagatgagggtctcactatgttgcccaggctggtctggaacttctggcttcccaaagtgctgggattacaggtgtgagcctctgcgcccagccaaggcttgtttttccaccttcagtttggttgatgtcattcaaatcacaacttttgttgtaagctcagctgttttcagacttgtcataattatcagggaatgtggttaaggtgccttccccttctctgcacagcctgggagagtatgttttcttcctcctggggatcgcattgtgtaactcttctcccgaaagtctgaaagggatgaatgtgtctgaaagtctggaaagacatggagaatcccctgcagggtgcagcaggaaagtcccaccatgagaggtggacttggactcttaggggctcgggtctcactgccatggggaactcaataggtgtctcgtataattggcaaacagaacccttggttccccacccccatcacacactgcgcttcctcatctaagtcttctcatctcaggaagtggtgccaccatgatccactgctcggaccaggatgtaggaggcctaattcttttttttttcttaatttttaatttttatttttttttattatactttaagttctagggtacatgtgcacaacgtgcaggtttgttacatgtgtatacatgtgccacgttcgtgtgctgcacctattaactcgtcatttacataaggtatatctcctaatgctatccctccccgcttccccgggaggcctaattcttagctcctctcttttcggtcctcccgcaccctccctgaccctccttggcccttagtgagtcctctcggctctacccacacgtgtgggggttctgtccactactcatctgcatttccgtggcctcccgggtctgagccccacccctccacctggaccgttgctgcagtctccttggtggtctccttgtttcctgtccatctcccgtagactgttcccctcaccagcagctggatgaggccaactataccagccaacacctctcccacctacagaaacctccaggctccccacgaggccctgtgcggccccgcccctgcccgcctttcaggctgcaccatccaccaccttcccttaccctcccacagtgtagcgtcttcctcctcctttcctcccctggaacacgccgtcatccatgacactgcctaagggcctttgtgtttgctgtacctccctttctgttcttccctcatatttttgtgaatctggctctttttttttttagcttatgacttatctcgaatgttactttcttccagccttccccgaccaccatataatctggttatctgcctgtcccctctaccagcccgctcacacaagcccccctcagtcacatcgtcctgtttttttcatagccctcctctattgagggccagcgtattgctcctgggcttctttcgtgtctccactgccctccaagctcctgggccaggtcctggcatagagctggcactcatgagtgtttgtcccattggtgagggcttgctggggagctgtactcggaaccagggctagtggtggtggactgcaggtctggagccggggatgtcaggttccccatcctggaatcactcacgtgccctgtaagtgtgcatgtattaacttccatttttgctgactataaaacaggaatcttggctggacacagtggctcatgcctgtagtcccagaactttgggaggccaaggtgggatgatctcttgagcccaggagttgagaccagcttgggaaacatggcgtaatcccgtctacaaaaaatacaaaaagtagtcgggcatggtggtgtgtacctgtggtcccagctactcaggaggctgaggtgggaggatcacttgagcctgagaggtggaggttgcagtgagccatgatcacaccaccgtactccagtccaggtgacacagcgagaccatgtctcaaaaaaaacataggaattggccaggcgtggtggctcacgcctgtaatcccagcactttgggaggccgaggcgggtggatcacctgaggtcaggagtttgagaccaacctggccgacatgatgagaccctgtctctactaaaaatataaaaaattagccaggcattgtggcacatgcctgtagtcccggctactcggtggggatgagacaggagaattgcttgaacccaggaggttgcagtgagctgagatggtaccattgcactccaggctgggcaatagagcgagactccatctaaaataataataataataagaagaagaatctcaatttttatcactgtctagtccacagggacatattaatataaatgaaacactaaacataaaatcctcatccccaattatgtaaatttgtgttattgaaatgtatgtacagagaaacgtaaatgtggttgtctcatggctcttttcatctcttctaattactgtttttatttaggttcagctacttcagtgttagaatttctgtcccaaaaagacaaagagagaatcaaagaaatgaagcaggcaactgacctgaaagcagctcagctcaaggccaggagtctggcccagaacgctcagagcagcagagcccagctctcccctgcagcggctgctgggcactgctcttggaacatggcattaggtggtgggacggccaccttaaaagccagcaacttcaagcctttcgccaaagatccggaaaagcaaaagcgatacgacgagttcttagtacacatgaaacagggtcagaaaggtgggtgctgggcctgggtgtcccaaatctcggcccgggcggggtcatattctcactgttctcatcctagacccatatttacagttgaggtatcctgttctgtcagtgtttttgctttatcctgctgcaaatagtgcaaaggtttcaggccttggctcttgacctcagaaagcaagaacagttggcttatgttcctccatatctcaggccaaagctagctgtttaagtagagaacacagctggcggtggccggtacttacaggccgtttggtgtttgcaagtgcttgactgctacaagcattgcattcacatttcatatcagcatcatcttccacctcatccgaagatcctaaccatccattcctgactcatagtctaaaatatgacttaaaacaatagttagctattgaaccgttacagagggaaaacaatcactttgtgatctgtgaagtaaatagggcaagaatgaggcaagaatgaggaaaggggttgctgttgtatgcagtagtcctcgtgagaggttatcagtaaattacagggttgttttttaaaaacagatctttgcggaatgtaaagtctatttactgtgccttaactctctactaagaacctacatcactaatgtttatttgctttaaaaaaaaaaaacggttagtgaaagagtgtttttctgccaaaacatagggatgtggttgaggtgaacttatcactgcctgggagtggtgacaagttccttactgctgaagatttaaccaaccattagcctctcaaatggttttctctgttatgtttggtagacagaattcaataaaagcatcattttggctggggatggtggctcatgcctgtaatccaagtactttgggaggctgagatgaggatcgctttagcctaggagttcaagaccagcctgggcaacatagtgagatcctgcctctaccaaaaaaaaaaagatatatatgtatatataaaatatattatatatatatatacacacatcatattttatttatttttttgaacggagtcttgctctgttgcccaggctggagtgcagtgtcaggatcttggctcactgcaatctcagctcactgcaacctccacctcccaggttcaagtgattatcctgcctcagccttctgagcagctgggactataggtatgtgccaccacgcctggtaattttttgtttcccgtctctactaaaaatacaaaaaattagccgggcatggtggcggacgcctgtagtcccagctactcgggagactgaggcaggagaatggtgtgaacgtgggaggcggagcttgcagtaagcagagatcatgccactgcactccagcctgggagacagagtgagactccatctcagaaaaaaaaaaaaaaaaaaaaagagagatggggtttcaccatgtttgccaggctggtcccgaactcctgacctcaagtgacccacccgcctcggcctcccaaagtgctgggattacaggcatgaacaactgcgcctggcctaaattttttttaaaaaagcacaattttgaaggaaacagcaatattacctgccaaatacctcaccattcccatagtcataaaaacaaggataaggacttatgaaatatacagggatacagtggtgcccagcagatgttctcttgtaagccccatgttttcctgaaaagtgaagctgcttcttgttctctgcccccgcagatgctctggaacgctgtctggaccccagcatgacagagtgggagcgaggccgtgagcgggatgagtttgcccgggcggccctgctgtacgcatcttcccattcgaccttgtcctccaggttcactcacgccaaggaggaggatgactcagatcaggttgaagtccctcgagaccaagaggtctgttgtcaccatgtcccttacctggtgaactttaatattaaagcactgcctagccaaaatagttttttccttttttttgagacggagtctctctctgtcgcccaggctagagtgcagtggtgtgatctcggctcactgcagcctccgcttcctgggttcaagcgattctcctgcctcagccttccaagtagctgggattacaggcgctcgccacaacagccatctaatttttgtatttttagtagagatggggtttcaccatattggccaggctggtcttgaactcctgacctcaggtgatccacccgcctcggcctctcaaagtactaggattacaggcatgagccaccatgcccggccgagccaaatatttttaatcccttggtgagaagatcaaaatatacatgtataggagaataggaaaccattttatgccttagtttccaatgtactggagcataaatgttatagcacaaacttttttcacagttctagaagattgcttgaaaattttaaatgggagagcagtcaggtcagtggtgcggccacttgatggaacagaatgcatgtctttttccagaatgatgtcggggataagcagtcggctgtgaagatgaagatgtttgggaagctcacccgagacacgtttgagtggcaccctgacaagcttctatgtaagagatttaatgtccctgacccttatccagagtaagttggataaacctttacatcagtacaaaatgtattcttgatattaaagctaattttccccttacatactcatataaattcttattttttctacatgaacttatttgcatatcactggatatacaaatctacacattttatagatttgctttgataaattacttctataatttgttactaaaacaaaatctggatagcaaactttattccatattgaagctatgaaactcagatatgtcaagttacaaaagcattatgcctctctcatttgccaccttcttgttgctgctcatgtggtttacatttataatgttacttatgtttttaaattatcattataaaagttaaacactttcttatttgattaataacacttcaagaggtggggtgtggtggtgcacacttgtaatcctagcttgggaggccaaggcaggaggatcgcttgagcccaggagttcgaggccagcccgggtaacatagtaagaccccatctctaaaaaatcaaacaaacaaacaaacaaacagaacacttcaagatagtaggccgggtgcaatggctcacgcctgtaatccctgtattttgggagactgaggcaggcagatcacttgaggtcaggagttcaagaccagcctgaccaacatggtgaaaccccgtctctactaaaaatacaaaaaattagctgggcgtggtggtgcgtgcctatagtcccagctatttgggaggctgatgcaggagaattgcttgaacctgggaggcggaggttgcagtgagccaagattgtgccattgcactctagcctgggtgacaaggcgagactcaatctcaagagaaaaaaaaacaaaacaaaaagatagcatatgtggtcaaaccagagactgtcagaaactttaggtatatttttatcagtggagcttttccttaatggaaatccattttgaaagttaaattcttgtccttatcataataaggaaaatctcatgggacctaaaatcagtcacccagattctcgaactgctttgagaagtgaaagcatcttaggagactttttagtcatgcagaagaggtggaaaacttgagatggaaagcttttcaggaggtggattttgtcctactggttgttactaaaatgattcttttttcaattcccagttcaactttagttggcttaccaagagtgaagcgtgacaagtactcagtcttcaactttctgacgctcccagagacagcttccttgcccaccactcaagcatcaagtgaaaaagtatcacagcaccgaggtcccgacagtgagtagggcgtccccggggtctctgattgaccagggcctcaacccctagcctgtaggaagacagaattaaagggtagtttagtcctaacaatgtgaatggtgcatattctccctccattgagggaattactcttactaataacttagctcatgttgtaatggtccagatgtttactctttggggttggggctctgtctctgcctctgccacctacctccccaggaccctacacagtgccaggcccctagtaggcacgctgacattctgagtgaatgaaagagcagtggtgaagaactggccttttccttgctaatgctggagtttatatctatgtcctgcctttcagaatcaagaaaaccatccagatgggatacctctaaacacgaaaagaaagaagattccattagtgaatttttaagtttggctagatcaaaagccgagccacctaaacaacagtccagccccttagtaaacaaagaggaagagcatgcaccagaattatccgcaaatcaggtatttggggcttccagattctctttgccacgctgagtgtggcccttgcttttctctttggtgacactttctcctcgtgactcaccagcagaggcagccaactattgatccatttccccttaaaggccatttggcttgtttctaacttttggctataacaagtaaagctgctgggagcattcatgtgcaagtttttgtgtgaatataagttttcatttctgtagagtacaaacctagtagtgggaatcctggaaaatatgtacatgtatatttaactttataagaagctgtcaaactgtattccaaagttatttttgccttatgtattttgaagtgcacttcttaggtgtatatacatttaggattgctatttctctctttttttttttttttttttttttgagatggagtcttggtctgtcccccaggctggagtgcagtggcatgatttcggctcactgcaagctctgcctcccctcccgggttcaagtgattctcctgcctcagcttcccaagtagatgggactacaggtgcgcaccaccatgcctggctaatttttgtatgtttagtagagatggggtttcaccatgttggccaggctggtcttgaactgggattgctatttcttttcagtgaattgatctttttttttttttctctgacaccggcttttactctgtgcccaggctggagtgcagtgttgtgataatggctcactgcaggctcgaacgcccaggttcaagcaatcctgcctcagcctcctgagtagttgggactgcgggcacacaccaccatgcctggctaatttttttttttttttttttttttttttttttcagagaaagggccttgctatgtttttccaggttggtctcaaacttctgctctcaagcagtcctcctgccctggcctcccaaagtgctgggattacaggcgtgagccaccatgcccagttgacccttttaacattatgtaatatcatctttatccctggtaattttctttagtgtttgcgtagtatatatctttttcatcttctttttaacacatctgtttcattatatttaaagtgggtttctttttttttttttgagatgaagttttactcttcttgcccaggctggagtacaatggcactgtctcggctcaccgcaacctctgcctcccgggttcaagcaattcccctgcctcagcctcctgagtagctgggattacaggcaggcaccaccatgcctggctaattttgtatttttagtagagacggggtttctccatgttggtcaggctggtcttaaactcttgaccttaggtgatctgcccgcctcagcctccccaaagtgctgggattacaggcataagccaccgcgcctggctaaagtgggtttcttataaacaccgtgtcactgagtctttcttaaaatacattttgataatttatattggacatttgcatttaatgtgatcatggatatttttggatttacgtgtatgatgttatattttctgtttattaccactcttttttgtttctttttttccccttctctgccttcttttggattacttgaataatttttatattccatttgaatttttctattttttttctcttggtattttttttttagtgattgctctagggattatagtatacctacttacctttttacagtctactgagaattaaatgttttaccacttccagtagaatagagaagctttagcactatgtaggtccttttactctcctccctctatgctgtcttacatattacatgtacacacaatgaaaatgccatcaaaccagtggtgatcatttttgcttttagtcattaaacatattttaaaagaaccgatgcagagacaatagcctactctgtttaatcagatattttctatttctgttgctctttcttcatccttgaagttccacgttcccctcacctatcatttctgtctgaggaacttcctttagcatttcttttagaccagttccaacaagtgattctcttaaattgccattatctgagaatgtcttatattttgtcttcattcctgaaggatgtttttgctggatatagaattctgggttgataatttttgttttgttttgtttgtttgttttttgagacggagtctcgctctgtcacccaggctggagggcagtggcgcgatctcagctcactgcaagctccacctcccaggttcacgccattctcctgcctcagcctcccgagtagctgggactacaggcgcccgccaccacgcctggctaattttttgtatttttagtagagacggggttttactgtgttagccaggatggtctcgatctcctgacctcgtgatccacccgcctcggcctcccaaagtgctgggattacaggcgtgagccactgcgcatggccaatttttttttaaattaaactgctacttcctccggggtttcgtgatttctgatgagaaatcttcaaccattcaaattgtcctcaggctgggtgtgttggctcacatctataatcccagcactttgggaggctgaggcagggggcttgtttgaggctaggagtttgagactaccctgggcaacatcgtgagaccccatcttttacaaaaaattaaaaaactagttgggtgtggtggcatgcacctgtggtcccagctactcaaggggctacggttggaggatcacttgagcccaggaggtcaacactgcagtgtgctatgatcgcaccattgctttccagcctgggtgacagagtgagaccctggctcaaaaaaccccaaaacaaattattattcctctgtacataatgatgtgatttttctcctagctgctttcaagatttttacttggtctttggattttagcggtttgattatgatgtatctgggtgtgaattcttttgagtttattttgtttggggtttgttaagttgcctgaatctgagtttggaaatagaacagaggcacagtgctctactgcatttttggggatcctagtagctgggattacagacgcccaccaccatgcccagctaatttttgtacttttagtagagacagggtttcaccattttggccaggatggtctcgatctcctgaccttgtgatccacccgcctaggcctcccaaagtgctggaattacaggggtgagccaccacgcctggcccggttttgcttctttgacctcatcagcacattgtacagttgttgactcggaaacaccacaaaaatagaagctatgtgagtgatcactgtttagttgggtggtgtgtggctatggatacccatgtacatgagcataaacataaatatgtgtgtctgggagtgtattctagaatgtctcctcccttttacccttgcctctgtatccctgactcttatttcactgtcaatacagaccgtcaacaaagatgtggacgcacaggctgaaggagaagggagccgcccatccatggacttattcagggccatctttgccagttcctcagatgaaaagtcctcatcctccgaggatgagcaaggtgacagtgaagatgatcaggcaggctctggggaggccaacttccaaagctcccaagacactgacttgggggaaacatcatctgtggctcacggtatgtcagtatttcagactcggggatctaaaggagaagacaatgactctaggacagctgcttctctgtttactctataatcttaaacccgaatgattagcaatcaatgatatgtaatcttttatatgtatataatttttttttttttttttttggaaacaggatctggctctgtccccagggtggagtacagtggcgcaatcttcggctcactgcagcttccacctcctgggctcaagcaatcctcccacttcagcctcctgagtagctgggactacaggaatgtgccaccacccctggctaatttttgtatttttagtagagatggggtttcaccatgttggccaggctagtctctaactcctgacctcaggtgatctgcccacctcagcctcccaaagtgctgggattacaggcataatcccagtgcccggctagttttccagacttttaaaatttttatatctcttctatctgaatatatagtaatctgcttaaaaaacaagattattaacgtgaatatgatcatttatcttcaaggttttttctttgataatttattttgagtgaaacttgtctcccgcagttctctgtgatgggacatacatagtcttacattcctgatggtttgtaagattttccttctcagatggccctttcttggggacacatttctacttttcaggtcttaggggcgctaggctacgtgcccacgggtgcacttggcacgctgtacctcagccattgctgcccttggttgcaggtgccctcgtgtgactgacttccagctctggagttcacaagggcagcaccggggtctgcgtgttcactgctgcatccttagcacctggcaggagtgaagtggtgtgggcaagcatatgttatctggtggcaaaagacatgaatgaaagactcagagacattaacatggggcagacgaatgacatgaacaccccgctgtttttcagctcttgtgccagcaccccaggagccgccaccttccttcccgatacaaaagatgcagatagatgaaagagaagagttcggcccgcggctgcctcccgtcttctgccccagtgagtgcagagccctttggttcgcccatttttatcagtgtgtgattgccctgagatggggacagtgtgacttagagccgaccaaacatacgtgcttgcttctggtttatatgttttcagtcatattttaaacccgttgtctccacctagtgcctgaaatgatagttgtttctatacaccttcagagacctccaaactttatttcctttacctgccacatgtttacaggagggtcctaagtatcttaagttttgttatagaaatataagtttcccaacagagcttaaagaaaaagagcctggccgggcacagtggctcatgcctgtaatcccagcactttgggaggccgaggtgggcggatcacgaggtcaagagatcgagaccattctggccaacatagtgaaaccccgtctctactaaaaatacaaaaattacctgggcgtagtgacgcacgcctgtagtcccagctactctggaggctgaggcagaagaatcgcttgaacccgggaggtggaggttgcagtgagccgatattgcaccattgcactccagcccaggtgactgagtgagactctgcctcaaaaaaaaaaaaaaggggctgcagccaggcacaatggctctagctgggctggtggctcacacctgttatcccagcactttgggagggcgaggtgggaggattgcttgaggtcaggagtttgagaccaccctggtgaatttggtgaaagcccatctctactataatttttataaaaattataaaattttataaaaatataaaatacaaaattatatattttatatataaaaattatatatatttttatattttataaattttatatattttacaaatttatatattttatatatttatatattatattttatatattttatatatttatatatttatatatttatattttatatatttatacttatatatatataaaatataaatttaaatatttaaaataaatatattttaacttaatttaaatatatttctaaatatatttaaataaaatatgtaaatatttaaaataaatatatattcatatataaatacatattaaaatatattcatataaatatatatatttagatattttataaattttaatatatttttataattttttatatataacaattatatataaaaattatatataaaattatatattttatacataaaaatgatatataaaattatatataaaattatatatttttatacattaaaattttataaaaatataaaatataaaaattagccaggcatggtggtgtgtgcctgtaatcccagctagtaaggaggctgaggcaccagaatcatttgaacctgagaggcaaaggttgcagtgagccgagatcgagatcgcgccactgcactccagtctgggtgacagagcaagactctgtctcaaaaaaaaaaaaaaaaaaaggtaaaagaggctgggtgcggtggctcatacttgtaatagcagtttgggaggccaaggcagacagatcgcttgagcccagtagtccgagacaagcccagcctgggtgacacagggagacccatctctatttaaaaaaaaagggtgggcacggtggctcacgcctgtcatcccagcgctttgggaggtcgaggtgggcagatcacgagatcaggagatcgagaccatcctggctaacacggtgaaaccccatctgtactaaaaatacaaaaaaattagccggacgtggtggcatgtgcctgtagtcccagctgctggggaggctgaggcagaagaagggcgtgaacctgggaggcggagcttgcagtgagccaagatcgcaccactgcactccagcctgggcgacagagcaagactccgtctcaaaaaataaataaattaattaatttaaaaaaaattaaaaaagaaaaagagaaattaaaaaaatagtatacaaaattggaggggaattgcaagaagagtatttaagactaatatatttttaaaattttatttatttatttatttatttttcagacagggtctcactctgtcacctaggctggagtgtagtggtgctgtcatagctcactgcatgacttctgggctgaagtgatccacccacttcaacctcccacagtgctggaattacaagcgtgaaccactgcacgcagccaagcctcctttttttgtctttttctttttcttttcttttcttttttttttttttttgagatggagttttgctcttgttgcctaggctggagtgcaatggcgcaatctcggctcaccgcaacctccacctcctgggttcaagcgattctcctacctcaccctcccaagtagctgggattacaggcatgtgccaccatggctggctaattttgtatttttagtagagatggggtttctccatattggtcaggctggtctcgaactcctgacctgaggtgatctgcccgcctcagcctcccaatgtgctgggattttaggcgtgagccaccgcacccggccgccaagtctcctttttactttagctaatgtagcaaatacaataaaatggtcctctcagaagtaaatacaatctatcccccattctgttccccaaatatctgtcaacaacttccatttagttgcatcttaaattggcatttcaagttaaaacatttacactggtttatcatctctttgagggctgggtttacaaacatctataacatggcccagatatataactaacataaaaatatcattattcactttatagtttctcatggtgcccatatgtgaatactggtttgattagctaactgctttcaaagacaggattaaaaagcagagaaaaaaagtatgaagttttgacaaattgcagtgaatgtatttcttatttgctatagttgttcagcacttttgttttattttgttttgttttgagacagagtctcactctgtcacccagtctggagtgcagtggcgcgatctcggctcactgcatcctccacctcccaagttcaggtgattctccttcctcagcctctggagtaactgggattacaggtgcctggctaattttttgtatttttagtagagacggggttttaccatgttggtcaggctggtcttgaacttctaacctcaagtgatccacctgcctcagcctcccaaagtgttgggattacggtcgtgagccactgtggcctggttgttcggccctttagtttcttttttttttttttttgagacggagtctcgctctgtcacccaggctggagtgcagtggcgcaatcttggctcactgcaagctgcgcctcccaggttcacgccgttctcctgcctcagcctcccaactagctgggactacaggtgcctgccaccacgcctgcctaatttttttatttttagtagagatggggtttcaccatgttagccaggatggtctcgatctcctgaacttgtgatctgcccgcctcaacctcccaaagtgctgggattacaggcgtgagccaccacgcccggccggctctttagtttcaaactggtatcagcacttgaaagccaagtcttttatgtccctttaccataatgtctttgataccctcgtaatagtgacttaatttggtctatgggttatttagggaaatgatttttgaaaaaaactagtgttaaaaaaaagttttgggctgagtgcggtggctcacgcctataatcttagcactttggaaagctgaggtgggaaaattacttgagtctaggagtttgaggccagcctgggcaacatagagagattgtatctcttaaaaaaataaaaaagaaaaaaattagcctggtgtggtggtacatgcctgtggtcccagctactcaggaggctgaagtgggaggattgcttgagctcaggaggtggaggctacagtgagctatgatcccactgctgcactccagcctgggtgacaaagcgagatgctgtctcaaaaataaataaataaataaataaataaataaataaataaataaatagctgggcacggtggctcacgcctgtaatcccagcactttgtgggggccaaggtgggcggatcacctgaggttgggagtttgggaccagcctgaccaacatggaaaaaccctatctctactaaaaatacaaaattagccaggcatggtggcacatggctgtaatcccagctacttgggaggctgaggcaggagaatcgcttgaacctgagaggcagaggttggggtgagctgagatcgcaccattgcactccagcctgggcaacaagagtgaaactctgtctcaaaaaaaaaaaattaaaagaattttggaaaaaaaaaaagttttgggaggttgaattttgaaaaatctggttgggcatggtagctcacacatgtaatcccagcactttgggaggctaaggtcagaggatcccttgagtccaaaagttcgataacagccttggcaacatagggagactctcacttccacaaaaaaattaaaaaattagccgggtatggtggtacatgcctgtagtcccagctactcgggaagccgaggtaggaggatatgtgaaccgaggtcaaggctgtaatgagctgtgattgcaccattgcccaccagtctgggagacagagcgagaacctaaaaaaaaaaataaataaagaaataggactacaaaattgcaggcatctgttaactgagttgagaaaatattcacccttacaaaacatcttgaaactttccttttttttttctttttttcttttttttcttttgagaaggattcttgctctgtcacccaggctggagtgtagcacgatctcggctcactgcagcctctgcctcctgggttcaagtgattctcctgcctcagcctcctgagtagtggggattacagatgcatgccaccacgcccatctaatttttgcatttttaatagagacagggtttcaccgtgttggccaagctgattttgaactcctgacctcaagtgatccgcccacctcagcctcccaaagtgctgggattacaggcatgagccaccgttcctggccgaaacttttctttaggtgaaaaaaattgatttaatgcctttcactgcttctactattgtgaaattttgttgatttagttacccagaaattaatgacctatgaaaacattttggtctgaatttggagatggagaattgaggcacatgcaaattctttaatgatttttaatgattatatacattattattattttttaaagttaggtagagatagggtctcactatgttgcccaggctggccttgaactcctgaggtcaaggatcctcctgcctgggcctcccaaagtgttgggattacaggcatgagccaccgctcccagcccattatgttgttttgatggtagttttttcagtgtttccacttgtaagacaaattcttataaaatacgtttttgtagagagaggaggatataagaagagctaacatttaggtgccagattctgagcttcgagaatcatggacatggccctgtctagtctagtctgtgtccctaaaaggattgggattcttattgtccccattttatagttggggaaactgggcgtgggagaggttaggcgacgtgtcgaagatcacagtgctggcagcagagctgagttccaattttggtctgtttctgagcttatctgatgatgttggattacaaaaggctttgtgggctttctggtccgactttatctgcatctggcagctggggtcacggcaggatactgattggatcacacaggtctttgttgaggtctctgacagctttctaagtacaactctgcaaggtggtgtgctaatctgtttctcagtgaggcagaagctaatccaagggcaggagttcttcctcagtgttaaacattccatctacactagatgcctgattcagcagtttaggagcttagttttggatagtctttgttttcgtgctatataggtcctgtgtttattacctttgtgtttcagatgctcgtcagacacttgaggttcctcaaaaagagaaacataaaaagaacaaagacaagcacaaggccaagaaagagcacaggcggaagaaagagaaggtgagagacttgtgtgtaccccaggatcagtgtggggtgggacccgctggtcagcccccaggagtgtcatatactgcagctgaagagcggatctggtggccaagtcacagttctctctgagacttaacagaaatgttgacattcaattcaaatgcttgatttttcagaaacattttcttttgcacttaaacgcccccccgctttttttttttttgagatggagtctcactctgttgcctagggtggatggagttcagctgcaacctctacctcctgggttcaagcaattctcctgcttcagcctcttgagtagctgggaccacaggtgtgcaccaccacacccggctaattttttgtatttttagtagagatggggtttcaccatgttggccaagctggttttgacctcctgacctccggtgatctacctcccaaagtgccgcgattacaggcatgaggcaccatgcccagcccttaaaaaaactttttttgtgaacattaaaaagcagaaaaaagggcatttagggatcttagagcaatgggtgaatattaaataataaaacaatttatttcttatttattcaatgttaagtgaaggtattattttcagcatttctcagctactttgtctttattagtttgagattttagtccgtcacttgccgtttgaagtaaaagaattcgaatggaaggcaggcatgtgctcccactgttgacgtctcttatttcatcaaccatgtcttcttttgggtttcagcacaggcttttaattaggttaatgttcttgttgggtacccaaagtagtctgggctaggtgctgaagaaattagaaacagtttccttactggccaccagagggaagcactcccacgtatggcggatgacgggcgttccctcctagtgaaaggaagaaaatgtgtgccgaccaaatctgtgtgtccttaccagtgtatctgctgttcggtaaccttctgccagtttcttccttgtggttttcctgggtgcccgtcatcctgacatgaagtttcccaggggtctgacaaaataaacaagtcaggttcaccggaggtggcacaggtcaccatgcataagatgtgtggtgtcacgtcttatgacaccaagtgttacgataggtcctgtctgcgccttcttggttctgctgtgtctgttgctggaggcgcagctgggtcagggtgcgcagttgagagtggcacagccgtctgccctgtgctgtcttgttaggctctcactctcactcactctaaatgaggtttaaacatttttttgaatgactccatcactgcagccttgttaacctttcattgtattgaattaaggaggaaaaaatacatttgttttcccccaccactatttgttttttacagaaaaagaaacacaggaagcacaaacacaaaggcaagcaaaagaataaaaaaccagagaaaagtagtagctccgagagttccgacagcagcgacagccagagtgacgaggaaaccgcagacgtgtcgccccaggagctgctgagacggtgggtagtgggagatggagggtttttcagaaacctttagaggcttattgagtgcttgatgtgtttgcttagaggcaaatatcagaaatgaaaaactggtaggccgggtgcagtggctcacgcctataatcccagcactttgggaggctgaggcaggaggatcgcttgagcccaggagtttgagaccagcctgggcaacatagtgagaccccagctctacaaaaacaaacaaacaaacaaacaaaaaacaaattagctgggcgtggtggtgcacacctgtgcctccagctatttgggaagctgaggtgggaggatctgttgagcccgggagttggaggttgcagtgagccactatcgtaccactacactccagcctgggtgatagagcaagaccctctccctaaaagaaaaaaaaaaatgtgtgtattaactaggctttttaaaaagtttgaatatctaattatgtaagtgatatgtgaatatattatcattatgaaaattcaggccaggcgcggtggctcatgcctgtaatcccagcactttgggaggccgaggcgggtggatcacaaggtcaggagctcgagaccatcctggctaacacagagaaaccccgtctctactaaaaatacaaaaattagctgggcgtggagcgtgtgcctgtagttccagctgctggggaggctgaggcaggagaatggcgtcaacctgggaggcggagcttgcagtgagccgagattgtgccactgccctccagcctgggcgacagagcgagactcttgtctcaataaaaaaaaaaaaaaaaagaaaagaaaattcagaccttacagccaatgcttaaaggagccctgactagttctccaaacctctactttctccacagtaacttctgccatcagtttcatatgtaacctttaagaccttttttgtgcaaccacacacacacacatacacactcacgtacatggatgcacatacacattgtttgtttcttttttagacgagtctcgttctgtcacccaggctggagtgcagtggtgcgatcttggctcagtgcaacctctgcctcccgggttcaagcagttctcctacctcagcctcccaagcaactgggattacaggcacccgcccccacacccagctaatttttgtattttgtatttttttagtagagacagtgtttcgtcatgttggccaggctggtctcaaactcctgacctcaggtgatacacccaccttggcctctgagtgccaggattacaggtgtgaaccaccatgcctggcctatatacagatttttgtgcacattttaaatataagtaatataattttatatagcatatatttatagggtatgaattttattttattttttgagacagagtctcgctctgtgacccaggctggagtgcagtggcctgatcacagctcactgtaaactctgcctctccggctcaagggatcctcccacctcagccttcagagtagctgggactgtaagtgtgcaccaccacacccagctaatttttttaaaaaatcattttttttgagacagagtcttgctctgtcacccaagctggagtgcagtggcgcgatcttggctcactgcaagctccacctcctgggttcacgccattctcctgcctcagcctcctgagtagctgggactacaggtacccgccaccacgtccagctaattttttgtatatttagtagagacggggtttcaccgtgttagccaggatggtctcaatctcctgacctggtgatccgcctgccttggcctcccaaagtgccgggattacaggcgtgagccaccacacccggcctaaaaaaatcttttttgtagagatgggatctcctatgttgcccaaactggtctcgaactcctggcctcaagtgatcctcctgcctcagcctcaggcgtgagccgctgcgcaggcctgctcttgccagttttatctttattgggaagaagggtgttgtgtgaattctttgagtgtctggcttctgagattccttcagatgatggtaggcagcagtgaggggcttgtagtcattgctgtggaagattccttcttgtgagcacaccacggtatgtttatctcttctgttgtgtggatactgggttttttactttgagtctgtggagcagggattttcagccagtgtgacccagctctgtttcaaatagaactgccacgaacattcctatatgtatgaaattcagatttaggccaggtgcggtatctcacgtctgtaatcccagcactctgggaggccgaggcaggcggatcatgaggtcaggaaatcgagactatcctggttaacacaatgaaaccccaaaccccatctctactaaaaaaactagccaggcgtggtggcacgtgcctgtagtcccagctactcaggaggtggaggcaggagaatcgcttgaacctgggaggtggaggttgcagtgaaccgagatcgcgccactgtactccagcctgggtgacagagactctgtctcaaaaaaaaaaaaagaaaagaaattcagatttaagactgacaacttgggggctgggcatggtggctcatgcctgtaatcccaataccttgggaggtcaagatgggaggatcgcttgagcccaggagttcaagaccagctcgggtaatatagggagaccctgtctctataaaaaaattaaaaaaaaaaaaaagacaacttggatgctttgggccctggagtgaatgtattttagttccttcccaagggtcatgcaacggatgcggtaggtgagtgaaactgagattaaaaattgcttgtattctcaaggctaaataagactagggaaaaaagttgcttttataagtggtcttaatacgaggtgtgggtgagtgagtctctgtgtgttttcagggtaatagaagaagcattttaagaacacagattggccgggtacggtggctcatgcctgtaatcccagcactttgggaggccgaggcgggcagatcacagtcaggagttcgaaacaagcctggccaacatggtgaaaccccatctgtactaaaaatacaaaaattagctgggtatggtggcatgtgcctgtaatcccagctactctggaggctgaggcaggagacttgcttaaacctgggaggcggaggttgcagtgagctgagatcgcaccactgcgctccagcctgggcgacaaaagtgagactccatctcgggggaaaaaaaaaaaaaagcacagattaggcagtacttcattgtgggttattgtgagtgcattttgtaggtgcagacatgctgctgtgatatggggaggcctggcattctcagcctccacggagctgtttggtttttcactttagctaactttccatttctctcttttctgttttcttttccaggctgaaaagtcttccactaagaaggcagtaattgaatgctgccctggctcgtcctagaatcatttctcctccatgatggaagcccagtgattgttcagttaacgcattgtacagagtgtatttatatgtaaattcctgctgtaaaataatttttaaaaccttgacatttcaaagactgccttgaaaggtcgcagaaattgatttctatttttaatttcagttagtatcgggggaaaaaaatccagactgaacagtttaattaaagtggaatttttctattttcttcttgatttttaaaaaatttcctgggacgttaaaaaagaagttaaaagtgaaggcttctctctggttttgtgatgaagacagcctggactcactgaaggacaagcgtgtgagaaggggcggttgcggcccctcctgccgttttttgggagtgaagctcttccctctctgggtggctgggttactgttggtgcccaggaagccccatgggagggcagagccagggcctggcagggggcctcagcctctcagggtagatgtcactaaagtgtctgagacaggcagggaaaccaggcaggagaatgtgcacccacagcctgggttacacggctgcagctccctgctctgaggccacctcatgtgtaccaaggagacctttttgaaaaataaagtgcagaccaggtgtgatggctaatgcctgtaatcccagagctttgggaggccgaggcgggaggattgcttgagcccaggaattccagaccagcctgggccacatagagacccctgtctccacaaaaaataaagtattgagcatttgtattttacattatgaaagtagcatcatagatcacaacaattttaaaagcagaaagaaggaagaggccgggtgcggtggcccatgcttgtaatcccagcactttgggaggccgaggccagcggatcacttgaggccaggagttcaaaaacagcctggccaacatggcgaaaccttgtctctactaaaaatacaaaaaaattagccaggtctggtgagcatacacctgtaatcccagctgtgtgggaggctgaggcacgagaatcctttgaaccctggaggtggaggttgcagtgagccgaaattgcgctactgcaatccagcctgggtgacagactcttgtctccaccaaaaaaaaaaaaaaaaaaaaagaaggaagaaaatcacttttagttttatcatccaaagatgacacccttcttcaatattttgaataattccaccctgtccttttctagctatggggctgttatctgactggtggtagcattttattccctgtcactgttgttggggttgtgacagatatttccctcatctattataaatgttgtaaacccacccctaataactgcatcttatttcatgcaggggctaccccataacttactgaccttttctgttttgtcatgaagtgggttggccaggagctgtacccaggcagaggacatgaagaaattgccctgtgacaggagccagggaaaccacagcggagggctggaggctggggtgctggttttgctggctcggcctggttcccagaatgcaaagcccatttttcttttttttgcaacctccacctcctgggttcaagccattcccctgcctcagcctcccatgtagctggaactacaggcgcacgcccccatgcctggctaatttttgttattattttttttaagtaaagatggggtttcactaaacctgttggccaggctggtctccaactcctgacctcaggtaatccgcccgcctcggcctcccaaagtgccgggattacaggcgtgagccaccgcgcccggctgcaaagcccatttttctataggtaacctgtgctgcgcggggtggcactagttttcacccagcgggcgaggaggcagcgaagtcgcgggcccagcgtagcgcgcgcctccgaagggcttggtgcgggcgcgggcgcgggcgcgcggcgccaccgttcccatccaggcttgtcggcggccaccggcggaccgggcttcgagatggcctccccgccgcggtgctccccgacagcccatgacagggaatgcaagttgccgccaccctccgcccccgccagcgagtattgtcccggcaagctgtcctgggggaccatggcgagggccttaggccgcttcaagctgtcgatcccgcacacgcacctgctggccaccctcgaccccctggccttggacagggaaccaccaccgcatctgttgcctgagaagcaccaggtgccggagaaattgatctggggcgaccaggaccctctctccaaggtcagaaccgccgctggggtgagggggcactggcctgttccccacacgggaggaaggcgctcgagctgtcgggggacccatggaaaacccacctggcttcaccaggacccccagcgaggccctaggcccatttccccatctgtggtacatctgtgggcaaaggtcagacccacctgagcagggcgtgctggggatgccggcgggggctccccgcactgccacctgctggggaaccaggactcttcgctgggaggaggctctgccccaccatgtgaccccatctagaccttggagtctccgtaggtaggcccacccacagtgatgctcctaattgcagcccaagggtcggtggctcagctctccccgtccaggagatacagttagcgtcagaagaaacgggaaactcagaataataataacaacaatgaattgggccaggcaaggtggctcacacctgtaatcccagccctttgggaggcccaggtgggaggatcacttgagcccaggagtttgagaccagcctgggcaacatagtgagaggtcgtctctacaagaaataaacttagcccagtgtgatggggcgcacctgtggtcccagccacttgaaaggctgaggcaagaggatcccttgaacccaggagtttaaggctgcagtgagctatgattgtgccactgcactccagcctgggcaacagagcgagactgtctccagaataaataaataaataaataaataaataaataaataaatatagagagagagagagaaagaaagaaagaaaaagaaaaagaaagaaagaaggagaaagaaagaaaaactggctgggtgcagtggctcatgtctgtaatcccagcactttgggaagccgagatgagcagatcacttgaggtcaagggttcgagaccagcctggctaacatggtgaaaccctttctctactaaaaatgcaaaaattagccaggcatggtggtgcgtgcctgtaatcccagctactcaggaggctgaggcagcaagatcatttgaacccgggaggcagaggttgcagtgagctgagatcatctcactccatctcaaaaacaaaacaaaacaaaaacccaataaagaacattctcaataagtagcgtttcatgcttggccttgatttattgcactcacatgcagatgtcagagtgtgtttttaataatttcctcgaaacctctgcctggcttcccagcatgtttaagatgaagtctggcgatctgcctgtggccttccaggccatttcaaatctggcacctctccatgttctcctcccccatccccctgtcttgctgacctacaagcaggtctggcctcagggatcttggcggttccctgcccccacggtattgcgctcttggggaggccctccctgaccgcccgtctaaagtagccagggccactgtctcctccgtgcctcatgccatggtctgacatccccgttccgtcctcaaggtgtcctctggctgccagcaactggcccctcgaggttagggactttgctcctaggtggctgctgagctgcagcatcaggtccaggccccatgggggaggaggctcttgaggtttatttgtggaatatgtgaatgaacgctacgcatagaagaaccgttttgtttttgctctgtcctctgcatgagctttgtcagcacctctgaaatgtactcatgtgttggggacttctctctgcagcccctgggacccctttacctagtggatcccaagggactgtgtgcagaaaaaaacctgaaacgagagccccagaaaagcctgtggtgggggtagcggaatggttcccccctcttgctaatgtttttccatgatggagttctaggttttttgttttcctattttttaaattaaattatatattttttaaattattaattttaattttgattttttttgtagagagggggagtctcgccatgttgcccaggctggtcttaaactcctggcctcaagcaatcctcactcctgggcctcccaaagcactggaattgcatgcgtgagccactgcacccagccaatttaatttcaatttttaatgatagttgggttttcctaatgagagagataacccaaaccctgcaggggcggcaggggctggggtcgccagaggcgggggcggtgcgggagggccgcgcaggtcatgtcccggggactggggccgctcctggggtagggagccaaccctgcacgcgcggccccggcctggcccgacggggttagcgaactcccccggagaaaagcccggtcccagctctccacgctccctggcaacggagcccgcgttccagtgtcctcgtgtccccgagccccctagaggcggggtatcatctcatcccctgcatctccacctgcacgtccccgacacccccccccccgccccgcatcacctgcaaccggaaggccaccgccgccctgaaccgtcgcatcccctcacccctgtcctcctgccaactcagcccagcaccctgacactgccttccaggccacacccctggtcttgcctccaacatttcccccacccccacacttccgcagctcaacctgggacgtgtcgccatgcgcgagctggggtgggtgggtggggggggtgacatcttcaggcttccctgctctgtcctctttttttccccccagttttactgagatataattcacgtaccatataatttaaccatagaagctgtagtggtttctagggtattcagagtactgtactccccagttccccaatacccatcctgccgacaccaggcaattctgctttctgtccatagatttgtctattctagaccttttatagcgatagaatcaagccatacgtggtctcttgtgactggcttcatttccttagctaacgtcctcaaggttcatccatgttgtagcctgtagcagtgctcccttcccttttcattaccaagtaatattctgttgcatggccatgacacattttctctttctttgagatggagtctcgctctgttgcccaggctggagtgcagtggcgtgatcttggctcactgcagcctctgcctcccaggttcaagcgattctccagtctcagtctcccagtagctgggcttacaggcatgtgccaccatgcccggctaatttttgtacttttagtagagacggggtttcaccatgttggccaggctggtcttgaactcctggcctcaggtgatccacccaccttggcctcccaaagtgctgggattacaggcgtgagccactgcgcctggccgaaccgcccgtttttcaaagtggctgcactactttacgttcctaccagcaatgtaggaggtttccaactattggcatccttgccaacacttgttatgggactttgatgatagccatcctaacaaatatgacacagtatcacactttggttttcttttctttctttctttctttcttttcttttattttttaagacgaagtcttgctctgtcacccaggctggagtgcagtggcatgatctcagctcactgcagcctctacctcccaggttcaagcgattctcctgccttagcctcccaagtagctgggattagaggtgcccaacaccacactcggctaattttttttttttttttgagatggagttttgctcttgttgcccaggctggagtgcaatggcacgacctcggctcactgcaacctccgcctcccgggttcaagcgattctcctgcctcagcctcatgagtagctgggattacaggcatgcgccaccatgcctggctaattttgtatttttagtagagacggggtttctccatgttggtcaggctggtctcaaactcccaacctcaggtgatccacctacctcagcctcccaaagtgctgggattataggcatgagccaccgtgcctggcctaatttttgtatttttagtagagatggggttttgccatgttggccaggctggtcttgaattcctgacctcaggtgatccgcctgcctcggtctcccaaagtgctgggattacaggcatgagccaccgcgcccggccacactatggttttcatttgcactttcctgatgtggtgagtcatgctgagaatcttttcatgtgctatcaactatttttattttttctttttgagacagttctcactctgtcacccaggctggagtgcagtgacatgatcatagctcattgtaacctccgcctcctgggttcaagcaattctcatgactcagcctcctgagtagttgggattacaggagcacaccacgatggctggctaatttatttatttttattttttattttttagtagagatggggttttgccatgttggccaggctggtcttaatctcctggcctcaagtgatccgcctgcttcagcctcccaaagtgctgagattataattgtgagccaccacatcccgcccttgcatatcttctttggagatatatctattcaaatcctttgcccatttaaaattttaatttttattatttaaaggcagggtcttgctctgtcacccaggctggagtgcagtgctgcaatcatagctcactgtaacgttaaccttctgggctcaagtagtcctcccgcctcagcctcctgagtggctgggactacaagtgtgagccaccatgcctggctcattttctttcttcttcttttttttttttttccaattttgtacagacagtctcactatgttgcccagactggtcttgaactcctaggctcaagcagtcctcctgccccagcctcccagaatgctgggattacagggatgagccaccgtgcccagccagaattttttttttttttttcagatggaatctcactctgtcacccaggctggagtgcagtggtgcaatcttggctcactgcaacctccgcctcctgtattcaagtgattctcctgcctcagcctccgagtagctgggattataggcatgcgccaccatgcccagccaagttttgtatttttagtagagatggagttttgccatgttggccaggctggtcttgaactcctgacctcaggtgatctgcctgcctcggcctcccaaagtgctgggattacagacgtgaaccacccccctggccagaattttttaaattcatttttttccgggtggtttattgcaagtgtttagaaatataattaactgttgtacattgattttgtgtcctgcaacatgtttagctcatctggtctctccttttttcagatcccatttaaaattctgagtgggcacgagcacgctgtgagcacctgccacttctgtgtggatgacacaaagctcctcagtggctcctatgactgcactgtgaagctgtgggtaggtggccggctgttaggtactcctggagcgaaaacctttcctaagcttaggcacctcctgtgtcgagttccccagcactgaactcacaggcacttgtgggtcctggtttgcaggtcttctgagcaaagtgccagaaggaggagagggtgagagcccagcctagacgaagttagggtggctgctgccagcttgcaggcctggaaacagtgggaatgggatggagacctctggactgagagtgccacacatttttttttttttttgagacggagtttcgctcttgttacccaggctggagtgcaatggcgtgatctcggctcactgcaacctccgcctcctgagttcaagccattctgctgcctcagcctcccaagtagctgggatttcaggcatgtgccaccacacccagctaattttgttttttgtttttttgtgttttttagtagagatggggtttcaccatgttggtcaggctggtcttgaactcctgacctcaggtgatccacccacctcggcctcccgaagtgctgggaatataggcatgagccacagcgactggcccttttgtttgtttgtttgtttttgagaacaagtgttgcccagatggagtgcaatggcgtgatctcagttcactgcaacctctgcctcccgggttcaagtgattgtcctgcctcagcctcctgagtagctaggactacaggtgtgtgccactactcctggctaattttatttttttagtagagacagagtttcaccacgttagccaggctggtctcgaactcctgacttcagatgatccacctgcctcagcctaccaaagtgcagggatgataggtgtgagccaccgtgcctggcccccacaccttttttttttttcctttcttttcttttcttttcttttttttttttttgagacagagtcttgctctgtcgcccaggctggagtatagtgccacgatctcggctcactacaacttccgcctctgggttcaagtgattctcctgcctcagcctccctagtagctgggactacagaggcacgccaccatgcccagctaattttttatttttagtagagacagggtttcactgtgttggccaggatggtatcaaactcctggcctcaagtgatctacctgcttcggcctcccaaattgttgggattataggtgtgagccactgtgcccggccaccccacacacctgtcagagaacggaagtcctggctgtgtttggggcctaggatgtcatctctctgggtctccttctcatctggaaaactgagctccatccacagagactggatggccaggtctgtgtggtcacagaggacagaaaggtgtccaggcctgggacctgttcatgaggggtggttggaagaggcaggcctgggtgcagatcagcaccccaaggtgcagcaggcaggggcaccggggatggggctgtgaggttcacatgaggttgcagaggtggctcctggagcccttctggggactgcagggcatggccagcaggcccaggcagtgcagatcactcaggagggctggggaggagcagggctgggggaaggcagtggccatgaggccaggctgcagaaggctgtgtggctggggctgggactcatgggagaggacggtcagttgtgagttttgcagcatctggcttcagggacaggagtggagggagttgaggctggttcctgggttctggtttgggtaacggggaagaggatagcccctcaccctacagacgacctcaagggaatgttttctctggtatttcctgctagggggacagatactcgcatgaagatcggaaataaagacatcagttgagtggttcttaggatggtacaggcaaaaggatttaagggtttggaacagaggatttttttgagacattatcagtcaatccccactattgtctgtttttgtttgtttgtttgtttttaatgaatttaagaccattggcctataacttcatacttgctcttttgtgaaatggaaatgggagaaaatatgcatacacacacacacacacacagccacaagatataatctgtgccaagggcatgacaactgggcaggagggtttgtggtggaccccacgtttaggacttaccagctgtgtgaccctggggggttgcatgacctcctgggcctccctgggtctgcccatgctgcacaggaccagttgtgtgaaggggctgccccggggctcaactcacctccactcccgccctccgtagctgtccttatggacacctggcccacagagcccagagcctcaagatcttgttagaaaaactgctggtttctctgggagcctcacccccacagcccacaggataacactagaggaattttttctttgttttgttttagagacagagtctttctctgtcacccaggctggagtgcagtggtgcaattacggctcactgcagcctcaacctcctggactcaagcaatccccccatctcaacaccccgagtagctgggactgcaggagtgcaccaccacacctagctaattttttatattttatattgtagagatgagggtcttgctacattgcccaggctagtctcaaactcttggcctcaagcaatcctcccgcctcagcttcccaaagtgctggaacttcaggcatgggccaccaaagtcccagtttcatagatgtatgcggacatgtgtggacaagaaaaaaagacacgtcggctgggcgcagtggctcatgcctgtaatcccagcactttgggaggccgaggcgagcaaatcacctgagatcaggagttcaagaccagcctgaccaatgtggtgaaaccccgtctctactaaaaatacaaaaattagctgggtgtggtggcaggtgcctgtagtcccagctactcaggaggctgagacaggagaattgcttgaacctgggaggcggaggttgcagtgagccgagatcgcaccactgcactccagcctgggcgacggtgggagactccgtctcaaaaaaaaaaagaaaagacatatgccaacatattcacagctgttaactctggggtcatggaaggatgaatgtttttctttcttgtgttttctgtaataaaatcatattacctttgtaataatatgagaaaaactaccaaacttacatttttttttttttttttttgagacagggtcttgctctatcacccaggctggagtgcagtggcaagaacacagctcactgcaccttttacctcctgggctaaaggcatcctcccatctcagcctcccaagtcgctgggaccacaggcacacaccaccatgcctggctaatttttttgtttttcgtagagacagggtctcactacattgcccaggctggtctcaaactccttggctcaagcgactctcctgcctcagcctccaaaagtgctgggattacaggtgtgggagcatgtttttttttttttcttttttgacacaggatctcactctgttgcccaggctgaagtgcagtggtgcagttatggctcactgcagcctcaacctcctgggctcaagtgatcctcccacctcagcctcctgagtatctgggactgcaggaacaggctgccatgcccagctaatattatcattttttgtagagatgggatctccctgtgttgcccgggctggtcttgagctcctggcctcaagccgtccttcctccttggcctcccaaaacactgggatacagcatgagccaccaaaacccagccccaaacttatttttaaatgaccagaaaaaaggtggcaatatattagagggagattgggcataggatgaagaatatttttcccagcttctctgtacatttatggactttccaagttattcacaataatctccaatgaggggaaaagggttttttgtttgtttgtttttttgagatggcgttttgctcttgttgctcaggctggagtgcagtggcgtggtctcggctcactgcaacctctgcctcctgagttcaagcgattctcctgcctcagcctcccaagtagctgggattacaggcacctgccaccacgcccggctaatttttgtatttttagtagagatggggtttcatcatgttggccaggctggtctcaaactcctgacctcaggtgatctgtccgccttggcctcccaaagtgctgggattacaggcatgagccactgcacctagaggaaaaggggcttttaaaagatttaaaaggtatttggatttgaggtgttgctgggggcagggactggaaacggggtcagtgggtgaggcagagaggggaggccaggggagattttggccaagatactgtgacaagaggagatgactgtgtagggttatgggttcaccctctacggagggacatggagcgcatggtgggagccacagctgagggtctcaaggagccagcagggggggacgaagatggaagaagagagccaggggaggagacaggtctctggagtggcagccaatgggaccagctaaggcaggggctcagaggagaggtggcgatttatgggacaaggggcgaaggcactaggagggcagagggagggagcacagggatgaggggctgcctggagaaagtggtggagggaggagggctggaagcagtctgtggtgcgggtggggaacacttggatgcacttcctgggacatggagaaggacggctcatgggaaggagggcatatgaggtggcagaggtgacagtgcctgcattgtggatggggcatggaacaggcagggaatgagagcaagaaggctgttgtggggaccgagggcctctccaagattagggtctctaatcttgggacaacaaccaaggtgaaaacaggcatctttcccttcatggagacaagagccctttggccaacacagacagcagtcccggggggcccttctgccgactcaaaaggggaaagaagggccgggcgtagtggctcacacctgtaatcccagcaatttgggaggcccaggtgggtggatcacgaggtcagtagttcgagaccaggctggccaatatggtgaaaccctgtctctactaaaaatacaaaaaaaaaaaaaaaaaaaaaaaaaaaaaggccggggggcgggaataacgtgggagaattggaagatgcaaggtggactgcacaggtggcaagttaccatcccatcccctgggcaatgacaaggggagaggctcccttgcccctggggtctctcagtcaccccagaggattaagaaagggtttaagtctccctgaaagctgagtgcaatggcccacgtctgtaatcccagtgctttgggaggccgaggtgagagggttgcttgaggccaagagtttgagaccagcctgggcaatgtagcaagaccctcatctctataaaataaaaaataaaaaattagccaggcatggttgtgcacttctgtagtcccagctactcgggaagttgagatgggaggattgctggagcccaggaggtggtgcctgcagtgagccataattgcaccactgcactcaagcctgggtaacaacagagtgagatccagtgtcaaaaaaaaaaaaaaaaaaaaaaaaggctggtcacagtgagtcacgcctgtaatcccagcacttttggaggttgaggcaggaggatcgcttgagccaaggagtttgagaccagcctgggtaatatagtgagaccttgtttctaccaaaaacaaaaaaattagccaggcgtggtggcgtgtgcctatggtcccagcgacttgggaggctgagatgggaggatggctttggcccaggaggccaaggggtgcagtgagccgtgttcttgccactgcactccagcctgggtgatagagcaagaccctctctcaaaaaaaaaaaaaaaaagtttggtagtttttctcatattattacaaaggtaatatgattttattacaggaaacacatgaaaacacaagaaagaaaaaaactcatctttccatgaccccaaagttaacggctgtgaaaatgttgtcataggtatttttttcttctccacgaacatccacatacatttatgaaactgggactgtaccaaaatactgatatgtactcaccataaacgtagacgccaaatattgtcacatctcctttattttccaactgtttattagaccccctttccctcgttcatttgaagtctaaccagtatttcccctttaaattgtctgggtccacagggatggggtcgtgcttctaaatgcccagtgtggagggagtgggccgatctctgcacagccgctgttcctgctcttggccacttggtgtcactgtcgagtctaaaactgcgcagccccacggacactgatcattctggcgctgccctcagttggccccggcccgcccagagtgcgtgcaggggcctggatcccacaacccaagacgatcattttcttttctttttgagacggtgtctcgctctgtcgcccaggctggaatgaagtggcgcaatcttagctcactgaaacctccgacttccgggttcaagcgattctcctgcctcagcctcatgaatagctgggactacaggcgcgcgccaccacacccagctaattttcatatttttagtagagacgaggtttcaccatgttggccaggctggtcttgaactcctgacctcaggtgatccacccacctcggcctcccaaagtgctgggattacagtcgtgagccaccgcgcccggcctggaagatattgctagattctgcaaagactttttggccagtaggaaaggaaaacacaatctgtttgcagctctgcccccagcatggccagtttccacctggtgtctggaattgcggggtaatttcccatggatgccaggaatggcaagggtgtccttcccgctcaggggacggacatgttgcaaagtcctttcctctttcggagctgagtgagagtcccaggaccttggagttctcagattttgctaccagagataagctaagggctaatgttgacctcgatttacgacttcagcaaacacggcagtgaccactctcttctcctctctctcccgttgatttgaggatccggtggacggttctgtggttcgcgattttgagcacaggcccaaagctcctgttgtagagtgcagcatcaccggcgacagcagcaggtgacctttccctcgtcttacactgggaagagggagggtgagcaggcatgccataaataggtatgcctgtgacatttttgtttttgttttaagtaatagatatggggtctcaccatgtggcctaagctggtctcgaacctgtggtctcaagcgattctcctcctgcattggcctcccaaagtgttgacattacaggcatgagccaccacacctgggctttgtgaatttttattttttatttagacaggattctgctctgttgcccaggctggagtgcagtggtgcaaacatggctcactgaagccatggactcctgggctcagtgatcctcttgcctcagcctcctgagtagctgggattacaagtgtgcaccaccacacctggctaatttttgtatttttgtacagatggggttttgccatgttgcccaggctggtctcaaactcctaggctcaaacaatcctgccttggcatcccaaagtgctggaattacaggcatgagccactgtacctggcctgttttgtttttgagatagggtcttgctttgtcacccacgctgtagtgtactggtatgaaaatgtaagtttcatgggaatttatctttttttttttcttttttgagacagagtcctgctctgttgcccaggctggagtatagtggtgcgatctcggctcattgcaacctccacctcctgggttcgagtgattctcctgcctcagcctcctgagtacctgggactacaggtgcacaccaccacagctggctaatttttttatttttagtagagaggggtttcaccatgttggccaggctgttctcgaactcttgacctcaggtgatccacccacctcggcctcccaaagtgctgggattacaggtgtgagccaccatgcccacatgggaatttatcttatatagaggacaaactttgccacagaaacgtgccatgtaagaagacaaggatacatttatgtttttttgtacaagaaaacatttcagaacaaaataagtagtctcttaaactatatccctgtgaaaagacagacatgggagcagagaggaaaacgattgatccttgcgggtgtagagatccctttaggagaggaaaacagctgggaggctgaggcgggcggatcacctgaggtcgggtagccttgaacaaggctagcctgaccaacatggagaaaccccggtctctactaaaaatacaaaattagtcgggcgtagtggcacatgcctgtaatcccagctactcggaggcttaggcaggagaattgcttgaactcgggaggtggaggttgtggtgagctgaggtcacgccattgcactccagcctgggcgacgagtgaaactccgtcttaaaagaaaaaataaaaaagaagaagaggaaaacagaagaaatgctactttgaaagcccttgatataaaggagcatgtgtgggtggctgaagagtactggggatgattgtgctgtggttccttgtgtgttaggtcctatttccttccttccttccttccttccttccttctttccttccttccttccttccttccttccttccccttccttcctcccttcctcccttccttccttctttccttttttttgatggagcctctcctgcccacgctggagcgcagtggcgcaatcttggctcactgtaacctccgcctcctggttcaagagattttcatgcctcagcctcctgagtagctgggattgcaggtgtgcaccaccatgcctggctaatttttgtatttttagtagagatgaggtttcaccatgttggccaggctggtcttgaactcctgacctcaggtgttctgcccgcctcagcctcccaaagtgttgggattacaggcatgagccaccgtgcttggctggttctctctagtttcagtgagaaccgaatggtccctagggtgggtgatggagcagtcttttaaagatgattgtgttaattataatcttggtcctaaattagaaaaatgaaaaaaagtcttcatagaagtcataggcaggccaggcgtggtggcttattcttgtaattccagtactctgggaggctgaggtgggaggatcgcttgaggccaggagagaccagcctgggctctgtctctaaggaaaaaaaaaaaaagagagagagaaaaaaatagccaggcatgatgatgagtgcccatagtcccagctactcaggaggctgaggtaggaggatcacttgagcccagaagctcaaggtggcagtgagctaggattgcaccactggactgcagcgtggatgacagagtgacatcctgtctcaaaaaagaaaaggaaaggcggggggcgggggaggatggaaaggaccacagacctaactgtctctgttgttaagaatcaatgtttggccaggcgcggtggttcacgcctataatactagcactttgggaggccgaggcaggtggatcacttgaggtcaggagtttgagaccagcctggccaacatggcaaaaccccgtttctactaaaaatacaaaaattagctgggcgtggtggcgggcgcctgtaatctcagctactcaggaggctgtggcaggagggtcgtttgaacctgggaggtggaggttgcagtgagccggtattgcaccactgcactccagctggggcaacagaaagacaccctgtctcaaaaaaaagaaccagtgttcgtcatcgtcatcttatttccagagtcattgccgcatcctatgataagacagtgagggcctgggacctggagacaggcaagctgctggtacgtatgcctgtccagtgggggcgttggttgcagcccaggggcttgaccaagcctcaggcagctttgggttggaccctgggtagggggaggtgataaaactccattcttctaggaaggaggcatgttcctggggatggaagtacagatgtgaactgcacccacaacagccattgcttgcaaaaagtctggagggtgagagggtgggcactgggggaggaagactcctggaggaggcggatggaaccaaggcttctgcttgaaagatgggatgggtttggatacacagaaagaagccagaattgggggtggggtgtgggggctggtattccaggctccccggtaagatgtttggatttgattagacaggaagtggggctgaggccatgggacaaaggccatgtgcccccaagaaccagggttctggcccttaccagtctgttctctttatatcttggagggggtcactctccgtccatcccacaggctcaagactcccactcggccctgcaccccttccaggcaccctcagctctgctcaggggcctcctcggggtctcctgcctcacccctgccgtccctccctctcagctcctgcaggccttttctgtcccttcctccttcctttccttaaaaaacaacctttcttgttagtgcaaaggtcagtttgtattcattgtaaacatttttagaaagacaagataagccaagtttttattttatgatgacgatgatgatgatttttagagacagggtcttgcaagctctgtcacccaggctggaacacagtggcgccatcgtagctcactgcagcctcaaactcctgggctcagatgatcctcccgccacagcctcataagtagctgggactacaggcgagcaccgccacacctggctcatgttttacttttgtagagatggagatcttgcatgtttcccaggctagtctcaggctcctggtctcaagcgatcctccagccttggcctcccaaagcactgggtttacaggtgtaacacaccacacctggcttaaaacaaccttttgattgctggctcatttcagtggaaggtcaggtatgataccttcatcgtctcctgtaagttttctcctgatggtaaatacgtggtctcaggcttcgacgtggatcatggaatctgcataatggacgccgagaacatcaccaccgtttccgtcatcaaaggtgagggtgtgcgggctccctgtatcttcagtctgccataggaatagccacttgtcactgactgacggtgaccttccattgctttatttggtgaaactgtaatggtatgaagcacgtcattaaagctgggacactaggctaggtgcggtggctgggattgcatctgtaatcccagcactttgggaggttgcttgagcccaggagtttgagaccagcctgggcaacagggtgaaaccctgtcactaccaaaaacaatacaaaaattagccaggtgtgatggcatgcacctgtagtcccagctgcttgagaggctgaaacgggagaatcacttgaacccggaggtggagattgtattgagctgagattgagccactggactccagcctggcagacagagtgagactccatctcaaaaaaacaaacaaacaaacaaaaaacaaacaaacaaacaaaaaaacacaccaaaactgatcctcttcagttaatgcttttccattcattcagtcttgtgcttttaacaaaggacacaatgttcggctccaacctcatgtggtcattgacagcctaatcttttattgaggggaggctcaggcttcttaacattaacattaacagagttaacattaacagagtcttgctatgttgcccaggctgatgtcaaactcctggcctcgagggatcctcctgcctcagcctcccaaagtgagggattataggagaagccccctcacccggcctacctgtatcttttttttttttcttttttgagatggagtcttgctctgtctcctaggctggagtgtagtggtgcgatctcgggtcacctcaacctccacttcctgggttcaagcaattctccttgcctcagccttctgagtagctgggattacaggcacccaccaccacgcccagctaatttttgtatttttagtagagatggggtttcaccatgttgggcaggctggtctcgagctcctgacctcaggtgatctgcccgccttggtctcccaaagtgctgggattacgggcatgagccactgtgcccagcctatttttaaaatataggacttagtaattgttgtatgacagtttcctggttgggacactgtgtgatgatgataccacatgttcccatgggggctgctgggtgaaggacatgggtgatttctctgttattccttacacctccatgggagtttacaattatcttaaaattaaagttaaaaaaatgtgtaatcattgtaaagacattcattatgggctgggcgtggtggctcatgcctgtaatcccagcactttgggaggccgaggctggtggatcacctgagctcaaaagttcaagaccagcctggccaacatggtgaaaccctgtctctactaaaaatacaaaaattagccgggcgtggtggcgggcacctgtaatcccagctactcgggaggctgaggcagaattgctggaacccaggaggtggaggttgcagtgagccgaaatcgcgcctctgcgctccagcccaggtgacagaatgaggccctgtctcaaaaataaaaaaatcattcattatgtaaataaaaaagcaaaaggctgctgtgtctgtcctgtctcctccccagaggcacctgttatgaaccatacattgctgggcagtcttcctgaaccctgtgtgtatgcctgtgcgtacaagtgtttgcacacacaacactgcttctcatatgtgctttgtgtttctttttatcgatgtggcactatgccatgtgcactgccccacagcttccctaatagcccctaagagcccacttgacactctgaccccaccatgcttcagactccagctttgccccacactgctccatgatccggcccaggcctttgcaagcactgttccttcttcctggagtgctcttccatttctgcttcccttgctggcttttcgggcccttcctggacccctcagggtggccaggcttatgttgtctgggccttggtggcccgtgcactcatctcatgatctgtggcatgtggcaggtcgttgcctggtccggggtgtctcctccatcagactggcagctctgcgggggcagggaacctgctgtgctcccggttcaaagcctgggacatagtagtcactcaggaatgtttgtgcaggtgtgtagctcctgatgaaaactggaattgtgttttgtaatcgtcactggctggggaagtcgtgggagtcctccagcccagcaggtggaaggcgtggtctcaagtccctttcctccgtgttctgcagatcatcacacaaggtccatcacgtcatgctgctttgaccccgacagccagagggtggcttctgtctcattggacaggtgcatcaagatctgggatgttacatcccaggccacgctgctcaccatcactaagtgagttggaccccaggaggccagaagggagtttgggtggggcgtccccattcatgacttcctgaattccacataagccagcatccatgtggacacgtctgtagcttggtcataggtgctctgaggaggctggggacaggcaggcaggagggagccatcagctgtggcctgtgggctgggctgggcctcagatgcatttgtttcaatgtgagccactagtggaaatcattgtgcagagaagtccacaaaaggtgaagttccagcatctcctgtaaaatgggaaggtctggctgggcgtgtggctcatggctataatcccagagctttgggaggccaaagtgggaggatcacttcaggccaggagttcaacaccagcctgggcaatgtcacaagaccccatctctacaaaaaatttaaaaattagctgggtgtggtgtcacacacctgtagtcccagctactcaggaggctgaggctggaggattgcttgagcctaggagtttgaggctgctgtgagctatgattgcaccactgcaccccagcctggacaatgaagtaagaccctgtctaaaaaaaataaataaataaagtgaattcagtcgttttggagatattacattatcatttaaaaaaattttggggctgggctcggtggctcatgcctgtaatcccagcactttgggaggccgagtggggcggatcacctgaggtcaggagttcgagaccagcctggtcaacatagtgaaaccccacctctagtaaaaatacaaaacttagctgggcgtggtggcgggcacctgtaatcccagctattcaggaggctgaggaaggagaatagcttgaatccgggaggtggaggttgcagtgagccaagattgtgccactgcactccagcctaggtgacagagtgagactctgtctcaaaatatatatatatatatatacacgcacacaacataaaacatgatattttaaccatttttaagtgtgcaattctctgccattcattacattcacagtgttgtgcaaccatcaccactatttatttccaaaatgatttcatcatctcagacagaagctcttacccgttaagcaataactccccattccccatgcccccagccctgggtaatgtttattctactttctgtctctatgaatctgcctattctagatatttcatataagtagagtcatacattatttgtcctcttgtgattaggttatttcacttaaaataatgtcctcaaggttcatctgtgttgtagcctgcatcagaacatcagaacttcattccttttttttcctttgagacttagtctcgctatgtcccccaggctggagtgcagtggtgccatcttggctcactgcaacctctgcctcctgggttcaagtgattctcctgcttcagcctcctgagtagctgggattacaggcgcccaccaccacacctggctaatttctgtattattagtagagacggggtttcatcatgttggccaggctggtctcaaactcctgaccttgtcatccacccacctcggcctcccacagtgctgggattaagaacttcattccttttgatgactgaatagtactgcattataggtgtacataccacattttgtttatctgttcatctgttgatgacctcttaggctgtttctaccttttagttattgggaataatgctgctatgaacacatgtacatgtaactttgagttcctgctttcaattctttttattttatttgatttcgagacagagtcttgctctgttgcccaggctggagtgcagtgacgtgatcatagctcactggagcctcggattcctaggctcaagtgatcctcttgcctcaacttcctgagtagctgagactacaggtgcacaccaccatgcctggctaatttttaagtttgttttttttttttttttgcagaaacggggtctcattatgtctcccaagctagtcctgaacttctgagctcaagtgatcctctcactttggcctcccaaagttctgggatgacaggtgtgagccactgcacctggcctgtttttaattctttactctgtatacccaggagtggaattgttggatcatatggtaatactgtgcttagctttttcaggagtggggatcttgcttattaattttgcactgagaactgaaaatgatatagcccgaccgacattatgaattttttaaatcctctagcaagatcagctatatcatttgcagggtgcaatctcggctcgctgcaacctccgcctcccgggttcaagcaattctcctgcctcagcctcccgagtaggtgggactacaggcgcccgccaccatgcccaactaatttttgtatttttagtagagacagggtttcaccacattggccaggctggtctcaaactcctgaccttgtgatccacccacctcggcctcccaaagtgctgggattacaggcatgagccacagtgcctggccacactgtggttttcatttacactgtcattcatattgtttttctcctataggtaaaaagtcatttctctcttgctgctctgaagatatttttgttgtccttagttttctgaagtgtaattatgtgtctgggtgtagatttctttggatttatcctgttgggttttactcagattcttgaatctgtaggtttatatattttgccaaatttggtaaaatttcagccatttaaaaaaattacttttaaagttgactccatcttgtccagaactgtacgtgcagcatagccattttccccaaacttctgtacaggtgaaatggccttctacgagaagtgggatttatgtgaaatgagagtccatagagatacctctggtttatttatttatttatttatgtatttatttatttagaaattgctatgtctttttttttactttaagttccaggacacatgtgcagaatgtgcaggtttgttacataggtacacatgtgccacggtggtttgctgcatctatcaacacgtcatctaggttttaagccccgcatgtgttaggtatttgccctaatgctctccctccacttgcctcccaccccctgacaggcctcagtgtgtgatgttcccctccctgtgtctatgtgttctcactgttcaactcccacttatgaatgagaacgtgtggtgtttggtcttctgttcctgtgttagtttgctgaggatgatgtccctgcaaaggacatgatctcattctttctcatggctgcatagtattccatggtgtatatgtaccacattttctttatccggtctatcattgatgggcatttgggttgacacgaagtctttgctattgtgaataatgctgcaataaacatacgtgtgcatgtgtatttatagaagaatgatttataatcctctgggtatacctctggtttaaacctcaatgacagtgtctggctgctgggagagcttgcagtcaaacctccatgatatgccagcatggttcttagctcaccaggcactgggaattggtgaggtttatcccggatggccctgcgaagttgacatttcttctcctttggcgttgctcagtttgtgcctttcaaagaaccaaaatgggttccaaaactctgatctgagctctagaaaattgttttgctcaaccttttcttcaggtcaaatgattgattttatgatccaggctactcagagaaaactctgcttacaagaggaggtgagaatcacaggagaaagacattgagggttacaaacaaaaagtggcaaaatacagacaggctttttattattattatttttctgaaaaagaagatgcttaaaaattggaatgaataacttcattttttttctgagatagagtcttgcactgttgcccaggctggagtgcaatggcacaatcttggctcactgcaacctccacctcctgggttcaagtgattctcctgcctcagcctccagagtagctgggactacaggcatgtgccaccatgcccagctaatttttatattttttgtagagatggggtcttgctatgttgcccaggctggtgtcaaaatcctgggctcaagcaatccttccacctaggcctcccaaagtgctgggattataggcatgagccactgcacccagccaaataacccacaattttattaattaaatatacaacactgaaatatacttgaatagcactgaagacaaatgaggataggagtgagaaaaagggagagtgaatagttggggtggagaagcagaggagtaagtaagagaggggtggaacagggggagaccacgcctgacattgttgggggaaagatggggagcaggagagagcctctgtgtaagcgccacccagcaccaagccccaaaggctgtctgtcaatcaatcactcctgacaccagctgcttttccctccagcgccaagggaatactgcagaatcttcccaaatgagggcaatttgtgccccagtggacatttgacaatgtctggactcatgttttgttgtcacaactgggtgtgggggttcctggcatctagccaggagaggccagggatgctgctccacctcctacagaacacaggacggcccccacaactctgagtgacccagctcaaaatgtccaccttggtgtggttggcccagtgccgtggctcacgcctgtaatcccagcactactttgggaggccaaggcaggtggaccactagagcctaggagtttgagagcagcctgggtaacatagcgaaacactgtctctattattatttttctaaaaattggtgcagtcgagaaatgctggaacagcgtgacagtctgagcaattcacatctggaccatggtaggcagtgatcaaaggcatgatgaacatgagctcacaggagatgctgacccccacttaggtatgtcttcaggtcctcttggggcgaagtgctagcatgtgcagcccgaccatgagctcacaggagaaaatacccccggctttaggtatgtcttcaggtcctccaggagcaaagcgctaatgtgtgcaccccaccatctgtgtttcagggcacattccaatgcaatctcaaactgctgttttaccttcagtggccatttcctgtgtacaagctcctgggataaaaacttaaaaatatggaacgtccacacaggggagtttcgaaactgtggagcctgtgtgactctgatgcagggccatgaaggttctgtcagttcctgtcactttgccagagacagtgagtaattaacatgcagaaggcctccattcctgtgggagtgctgggcagagttctccatgttccgttcaaatggacagagaggcaatttccaatgatgctgacagggagggcggattcttccccacgagaacaaaaaacccaagagggaagaccacaggtaccagtttacagtggtagaaactcagctcaatgtggcgtatgcaaccaaagaaattgattaatcctgtaatggaaaagtccaagagcacgtctgacttcaggcatggatgggacaagagagtcaatgctgttgggaacccaacccttccactctgtctttcaacctagcttccctctgtatcagcctttacccccaaggaggcaaagatggccggatgaggtgccttatgcctgtaatcccaatgctttgggaggccaaggtgggaggactgcttgaagccaggagttcaagaccagcctgggcaacacagcaagaccctgtctctacaaaaaaattaaaaaattagctgggtgtggtggtgcacacctgtagtctcagctcttcaagaggctgaggtgggaggatcacttgagcccaggagtttgaggctgcagtgagctatgattgtgctactgcactccagcctgggcaacagagtgagaccctgtgtctaaaaagaaaaaaaaaaaggccaggcacaatggctcatgcctgtaatcccagcactttgggaggctgaggtgggcggatcacctgaggtcaggagttcaagatcagcctggccaacatggtgaaaccccatctctactaaaaaatacaaaaattagccaggtgtggtggtggatgcctgtaattccagctattcgggagcctcaggcaggagaatcgcttgaacccgggaggcggaggctgcagtgagccaagattgcaccactgcactccagcctgggtgacagagcgagactctgtctcaatatatatatatatgtatatatatgtgtatatatatatatatgtatatatatgtgtatatatatatgtatatatgtgtatatatatgtatatatgtgtatatatgtatatatatgtgtatatatatatgtatgtgtatatatgtgtgtgtgtatgtatatatgtatgtatgtgtgtgtgtgtatgtatgtatatatatatatatatatatatatatatatatatatatatatatatataaaattaaagaggtaaagaggacctttagtggtccagctcagcctagttctggcccctggcagtcctggagaaagagaccttctgtctgatggtgccagaacaagtcccagggaagactcccattggctcagcttgggacacatgtccatctcttaatgaatcacttagggggcaacgaaagcctctgattggccaggtctgggtgacttgcccacctgcagagctagggttggggtcagaaccccctgatgcagagggactaagagtaggcaaggagtgtttccccacaggaaattgggagctgttgccagataaagggacatagaggtgaatgggggcagtgacaggaagccaccgcggctagccagctccagggagggaagtgggtgctcttgacactcaggagccaaacatatgctcccctatcctggtgagaagtggggcttgctctgtgtgtctgggggcctcagctggcacacatgccactggggcctggcttgagaagcactagggtgcttctgggcaactttccctcttcagcagcaccccttgtctaagtcccactgtgaggcaccctgccagcttctgtccttggctttatggggttcagaatcacatgcagttgagccaaaattgtgccactgcgctcctacactctagcctgggtgacggagtgagactctgtctcaaaaaaagaaaaaaagaaagaaaaaaaaaagaatcacatgcagttaatcattattattcctgattctgtatttgtgaagtcacctacttgctgatatttatttgtaaacctaaagtcaacattcatggcactttcaaggtcactcacagatgtgaagagcagcaaaaaatctaagtcacctcccagctgaggttggacaaggcaacactctgccttcttgtttcacctcccacgtggtaaaatgtcctttttgtggtctatttagtgccaccatttttttttgttgttgtttgtttgttttgctccctctgttgcccaggctggagcgcagttgcgcgatcttggctcactgcaacctctgcctcctgggttcaagcgattctcctgcttcagccttccaagtagcttggattacaggtgcgcactaccatgcctggctaatttttgtatttttggtagagatggggtttcgccatgttgtccaggctggtcttgaactcctgtcctcatgtgatctgcctgcctcagcctcccaaagtgctgggattacagacgtgagccaccacacctgggctttcttttgctttttgttagtgattttgctgtgtaaaatggctcccttggccgtgtgtggtggctcacagctttaatttcagtgctgggggggtgctgaggcgggagtattgcttgaacccaggagtttgagatcagcctgggcaacatagtgagaccccatctctaccaaaacaaaaaaaaaaaatttagccaggtgtgctggcacctgcttgtagtcccagctacttggtaactgaagtgggaggattgcttgagaccaggagtttgaagctgctgtgagctgattgcatcactgcactctagcctgggtgacagagcaagaccttatctctaaaaataaataaataaataaataaataaataaataaataaataaataaataacaaataaaatgatccctaaccacagtgccgaagtgctgtttgccgttcctaagcgcgagagtgctatgatggggaaaatgcatgcatccattcaggcatgagttacagctgttggttgtgagttcaatgtaaacaaatcaacagtatatatgcaataaggtgtctttaaacagaaacacacataaaacaaagttacgtactgatcaactgatgagaatgtgaccagagctcgcaggaaactgaccctgtatttcccctaggagcgatggttcagtattcactaattcagtgtctgcaaaaactgcagaggcccccaacctttctggcgccagggacaggtttcatggaagacaacttttccacaaatgggagctgtggaggatggtttcgggatgacccaagtgtattacatttattgtgccctttatttttattattattacattgtaatatatagtgaaataattatacaagtcagcatcatgtagaatcagtgggagccctgagcttgttttcctgcaactagatggtcccatctgggggtgatgggagacagtgacagatcatcaggcattagattctcataaagagtgcacaacctaatccctcgcatccgcagttcacaatagggttcatgctcccgtgagaatcgaatgctgcagctgatctgacaggaggccgagctcaggtggtaatacgagcgatggggagtggctgtaaatacagatgaagctttggcttgcttgcctaccactcactgtctgctgggtggcctggttcccaacaggccatggattggtaccagtctgtggcccagggactggggacccctgtcatagaacatgactactgtaaatgataagaatcagctgtaattggcttggggtcgtggagccactccaggaaggggtttcagtgttgtcagagtgagatgaggtggtgcctcgccaaggcatcttcagctggctttgggctcacttggcttggaaagttgacccccatctccaccctttcattttctgttgcaggctcttttctcatttctggagggtttgataggactgtggctatttgggatgtagcagaaggctaccggaagctctctttgaaggtacatgtggccagcatgagattgaggatctgaacttccctcccgagtccttcctgtgctcaatgctggttgctggggacacagctgtgagtgacacaggccttgatgcctctgtgggctgatgaaggacagacaggaagccagcaaacacaccaccgactgtgaggagtgaaatggagaaaccacaacagggtgacatgatggggacagaggcgggggacccatccacattgcatgggcagagcttcctggagaaggaggtgtttgagctgagaacagaaaggactacataagtggggatcttgaagaagaagggcagtccaggcagatggaacagctgatgcaaaaaccctgaggtgggagtgtctaagaacagcagaagttactgtgcaggcctgggcactgtggctcactcctgtaatcccagtactttgggaggctgaggtgggcggatcacctgaggtcaggagtttgagaccagcctggccaacatggtgaaacccccgtctctactaaaaatacaaaaatcagccgggtgtggtggtgcaaacctgtagtcccagctacttgggaggctgaggtgggaggatcgcttgaacccgggaggcggaggttgcactgggccaagattgtgccactgcactccagcctgggcgatagactgagattctgtctctaacaaaacaaaacaaaacaaaaaacagaaattaccttgaagagagacgcatgccctagtgaggcatgcacagaaagcttggggttccaaaatggggatgtcaactgaatgctctgggctacaagtgagaggatgagaggagccccaactcagagtggctctatgatacggggatgtgttatccaacacagcaagaacccacaattgcctcatgctgtgcccctgttcccccaaggggccccacaccccaggatttctgcatactccctggtttcacgatctcactgtcacctttggctgtgaatgcgtgcatccctgattcttggtctttctgttcccagggacacaaagtagacatgtgtccttgagcagcccatattcaggtccctggggctggtctatctgagctgtcttctcctaggacttggggagacaaagcgagtttcctcacagcaaataaacggattaaaatggaatgttaaacctctctgtgcttaaagtccctctgtcatctaggcacagtggctcatgcctgtaatcccagcactttgggaggctgaggctggaggatcattggaggtcaggagttcgagaccagcctggccaacatagtgaaacaccatctctactaaaaatacaaaaattagccaggtgtggtcatgcccacctgtagtcccagctacttgggaggctgaggcataagaatctctagagcctgggaggcagaggctgcagtgagctgagattgcaccactggactccagcctgggtgacagagccggttgttctattctctctcctcttctctcctctttctctgtgctcccatcctcaaattcctgtcctttaattacactaagcggtttaaccttccctctgattcctttttctctaaccacactatggcctcactttctgcctctttccatacggggaaggccaaagaaggacagagatgctggcataaagcccagacatcattcagtgtctgaggcagcaatggcagctatctgctctgagctgttttttttgtttgtttttttttgagacgggagtctcgctctgtcgcccaggctagagtgcagtggcatgatcttggctcactgcaagttccgcctcctgggttcacaccattctcctacctcagcctcctgagtagctgggactacaggtgcccaccaccatgcccggctaattttttttttttaaatttttattttttagtagagatggtgtttcaccatgttagccaggctggtctcgatctcctgacctcgtgatctatccgcctcggcctcccaaagtgctggcattacaggcatggagcaccgcgcccggcctgctctgagctcctatgtacccaaagaaaacaccccactccttctctgcttaagccacagtggatcgagtttgcagttattggaagcgaaaagccccctcacttacagggcctctgaggggtatttcctagaacaaagaatgcaaatgaaaacctgagaccagctgggaatataatatttctcccccaatcttgctaaacacccgagtactattttaaaaaaccatacacagtggcacacacatttgtagtcccagctactcgggaggctgaggcaggagaatcacttgagcccaggaggttgaggctgcagtgagctatgattgagctgctacactccagcctgggggacagagtaagaccctgtgtcaaataaaaataactaaataaataaatatagaatgggtagggcgcagtggctcatgcctgtaatcccagcactttgtgaggctgaggcaggtggatcacttgaggtcaggagttcgagaccagcctggccaacatggtgaaactccatctctattaaaaatacaaacattaggtggggtgtggtggctcacgcctgtaatcccagcactttgggaggccgaggcaggcagatcacgaagtcagaagatcgagaccatcctggctaacacagtgaaaccccgtctctactaaaaatacaaaaaattagccgggtgtggtggcgggcgcctgtagtcccagctactcgggaggctgaggcaggagaatggcgtgaacttgggaggcggagcttgcagtgagccgagatcacaccactgcactccagcctgggtgacagagcgagactccgtctcaaaaaaaaaaaaaattagctgggcatggtgatgggcacctgtaatcccagctacttggcaggctgaggctggataattgcttgaacccaggaggtgaaggttgcagtgagtggagattgcaccattgcactccagcctgggcgacaagagcaaaactctgtctcaaaacaaacaaacaaacaaaccccaaaaaacaacaacaacaaaaaaaatagaatgtacatatatcacatgtctttacactttgtattccaccctaaatgttgttgatgaaaccgaggaagtacaatgagctgctctgctctttccttttttttttttttttgagacagtctcactctgttgcccaggctggagtgcatgatcatgactcactgcagcctcaacctccccgggctccggtgactctcccaccttagcctcctgagtagttgggattacaggcgcatgccaccatgctcggctaatattttgtatttttagtagagatggggtttcactatgttgcccgggctggtctcaaactcctagactcaagcaatctgtccacctcaacctcccagagtactgagattacaggcatgagccactgcactcagccagctactcttaaatgtaagcaacactgggttcttgactttttgttgtttttttagatatgggacctcactctgttgcccaggctgaagtgcagtggtgcaatcatggctcactgcagcttccacctcctgggctcaggtgaccctcccgactcggcttcccaaaaggcaggttacaggtgtgagccactacacccagcttgtttttgttgttctttcaaaattattttctccacgttttcattaaaatttgatatttcttcagggccataatgactgggtgatggatgttgccattagcaacaacaagaaatggatcctgtctgcttccaaggtaaaagtggtcaagcttacaatatcgatcacgttcgccaggattggtgatagtggaagagttattgccaagtataaaattcctgggtgggttcggtgagctgtacctgaccgggccatcgtgttcacggagctgcctgggaatgtggacagcatgtccttctatgcgcaaacgcgatgagtttggagtttccaggtatttctgtgtctgtaccgttgacatttgaactttgttggaaaaagagtctggctggatcagtgagcaatggagccaatgggggacttgaagggaaagcatcaactcatggataagcctttgacactgcccaaggtccgggggggtctccctttcctgcagcactgcatcttgagattcccattccactggcacatagcagccagcccaggatatcccaacagctgtcctgcaggtgtgaaccccggagaagtggggacctactccgccctccacccatattagagcagcagtccccaacctttttggcaccagggaccagtttcgtggaagacaattattccatggttggggggcgggggatggttttgggatggtgcaagagcattacatttattgtgcactttattattattacattgtaatatattatgaaataattatacaacccaccattatgtagaatcagtgggagccctgagcttgttttcctgcaactagatggtcccatctgggggtgatgggagacagtgacagatcatcaggcattagattctcataaggagcacacagcctagatcccttgcatgcacagttcacaatagccttcgtgctcctgtgagaatctaatgtggccactgatctgacaggaggtggagctcaggtggtaaagctagtgacagggagcagctatatatacagatgaagcttcacccctgctcacctcctgctgtgtggcccatttcctaacaggccacagactggggggtcggggacccctttatttgagcatgtcatgttctaggctagaggtttctaaatccaggagactgtgggagaggcgctgcctagcatgatcaacttttcagagagccaacttggaatacaaacatatcagaaaaaaaaaacaacaaacccataataatacaatatatagcaaaagattatatgcctatatgttactactttaatataaaaataagaagtaaaggtttacttgaaattatacattattttatattttttacttttttgttccatgaatattattatttaagcaaaacaacaggactagtgaacagcgacaattagtagtaattaacagtagggcaaattaaacaaatatgtttgagaaaaatataaaaatattggccaggtgaagtggctcacgcctgtaatcccagcactttgggaggccgaggcgggtggatcacctgaggtcaggagtccgagaccagcctggccaacgtggtgaagccccgtctttactaaaaatacaaaacttagccgggcgtggtggcaggtgcctgtaatcccagctactcgggaggctgaggcaggagaattgcttgaacccgggaggcagaggttgcagtgagccgagatcacgagatcaagccatggccctccagcctgggtgacaagagcgaaactctgtctcaaaaaaaaaaaaaaaaaaattatgtttctttctattctttgatacagtactttagtgttactttaaaaaaaatcttggctgggcatggtggctcatgcctgtaatcccagcactttgggaggttaaggtgggaggatcgcttaagtccaggagttggagaccagccttggcaacatagtgagacgctatctctacagaaaaactttaaaaaattaaccgagtgtggtggtgtgtggctgtagtcccagccactccaggtccagctacttgggaggctgaggtgggaggatggcttgagcctgggaggtcgaggctgcagtgagtcatgatggcatcactgcactccagcctgggccaaacagtgagactggttgtggtctcaaaaaaaaaaaaaaaaaaaaaaagctgggtgtggtggccactcacgtctgtaatcccagcactttgggaggccaaggcaggcagatagcttgagctcaggagtttgagaccagcctaggcaacgtggcaaaaccctgtctctataaaaaattagccaagcatagtgatatgagcctatattctcagttactccaggcccagctacttgggaggctgagatgggaggaatgcttgagcttaggaggttgaggctgcagcgggctgtgatcatgccattatactccagcctgggcgacagagtgagaccctgtctctttaaaaaaaaattattgaatatttaaacttttggctaggcgcagtggctcatgcctgtaatcctagcactttgggaggcagaggtgggaggtctgcttgagcccaggggtttgggaccagcttgggcaacatggtgaaaccctgtctctaccagaaatacaaaaaatagctaggagtggtggcgcacacctgtagttccagctactcactcaggaggctgagatgggaggatggtttgagcatgggaggcagaggctgcagtgagccacaatcatgccactacattctatcctgggtgacagagctagaccctgtctccaataaataaataataaattttgtaggttatattatatattcttaagatatatagaggtaagactgtttaaaaaagagaacacaaataaaataggattgattaaatacatattacttatatttaatgtaaagcagtgacttcattctatgaggccagcacaagttggataccaaagccaagaacaaacatgacaataaaagaaaattacagaccaatatctcatattaatatagatgcaaatatgctcaacataatattggcaaataaaatccaacagtacattaaaaggattatttaccatgaccaagtgggatttatcccagggatacagggtggctcaacataaaatcaatgtaatatattacattaatagaacaaagggaaaaaaaaccctatacaatcatttcaactgacacagaaaaggcatttgaaaaaattcaaaaccctttcattataataataaaaaaacccagaaagctaggaataaagggataattccgcaacatgataaagagtgtttagaaaaaatctgcagctaacatgattctcagtggtaaaagactaaaatttttcttccctaagatcaggatcaggacaaggatgcctactttcattgctactattcaatattgtactggaagtgctagccggagctatcagacaagaaaaagaaataaaaggcatccaaattgaaaaggaagaggtaaaattctcttcctttccttccctccctcccaaccttccttccttccttctcttccttccttccttctgtcctttctttcttccttccttcaatccttccttcctgccttccctcctcttttctcttctctcctctcctcctctctcctctcctctctcctctctctttctctctttctttctttctagggtctcattctgtcacccaggctagagtgcagtggcacaatctcgactcactgcaacctccatctcctgggttcaagcaattctcccggtagaaacgggatttcaccatgttgtccaggctggccttgaactcctgacttcaagtgatctgcccaccttggcctctcaaagtgctgggattacaggtgtgagccaccatgcccagccaaaatgatttctttctttttttttttttgagatggagtcttgctctgtcacccaggctggcgtgcagtggcatgatcttggctcactgcaacctccatcttctgggttcaagcaattctcctgcttcagcctcccgagtagctgggattacaggcatgtgccaccatgctcggctaatttttgcatttttactagagatggggtttcaccatgttggcaagggtggtcttgaactcctgaccccgtgatccacccgcctcggcctcccaaagtgctgggattacaggcatgagccaccgtgcccggccccaaaattatttctattcataggtggcatgatcgtaaatatagaaaatcccaaagaattaacaagaaagctactaaagctaataaatgaattcaacaaagtttcagggtacaaaatcaacacacaaaaaagcagttgtgtttctatacaccagcaatgaacactctgaaaaggaagagcaattccatttacaatggcatataaaacaatacttaggaataaatctaacaaaggtggtgaaagactggcacaattaatactataaagtattgctgaaagaaattaaagaagacttgaatgaatggaaagacatcctatattcatggataggaagactcatcattaagatgtcagtactactcaaagtaatctacagattctgcataatccttatcaaaattccaacagcattttcatatgaaattgcaaggggccccgaatagccaaaagaatcttgaagaaggagaaggggaaggagaagaataagagggagaaggagaagaagaaaattggaggactcacactttctgactttgaagttactacaagtctacagtaattaaaacagtgtagttctggcatagggacagacatatagacaaatggcttagaatagaaagcccagaaataagggatttttgacgagggtgccgagaccattcaatggagaaagggcagtcttttcaacaaatggtgctaggaaaattggaaatttacatgcaaaagaatgaaattgcacccttacctaatactgtatagaaaaattaactcaggatcaaacaccttaacttgagagctaaactataaaacccttagaagaaaacagtggagaaaatcttcatgatactgactttggcagtgatttcatggatatgacaacaaaagtataggcaatgagagcaaaaacagacaaactaaacttcgttgaaattaagaacttttgtgcatcaaaggatactgtcaagaaagcaaaaagacaacttagagaatgggagaaaatagttgcacatcatgtatctgataagggattaatatgcagaatacataaagaacttcgaaaactcaacaacaaaaaacaaacaacccatttcaaggatgggcaaaagactcgaataggcatttctccaaagaagatatacaaatggccaagaagcatatggcaagatgctcaacatcattagtcattagggaaatgcaaatcaaaagcacagtgaggtatcacttcacatctattagggggtctataataaaagaactcagaaaataatgaatgttggcaaaggatgtggagcaactggaacccttgtgcctgactgatggtgacagagtgagacccagtctcaaaaaaaaaaaaaaaaaaaaaaagattttacttactggcaacaacaggttttttgatttgtaggctttatttcccagcactccaaaagtgttcaatgtactaaatctataagcttgctttgaaagaccaggtatttgtcaatgaagtcctttgcactataaattcacggtataggctatatctatctaaaatgtgcattatttatttattttattttattttatttttgagatggagtttctctcttgttgcccaggctggagtgcaattgcacaatcttggctcaccgcaacctccgcctcccgggttcaagtgattttcctgcctcagcctcccgagtagctgggattacaggcatgcaccaccacgcctggctaattttgtatttttagtacagacggggtttctccatgttggtcaggctggtcttgaactctcgacctcaggtgatccacccaccttggcctcccaaagtgctgggattacaggcgtgagccactgcgcccagcccatttatttatgttttaaagagacagggtcttgctgtatcgcccaggctggagtgcagtggcatgatctcagctcactgcagcctgaacctcccgggcttaggcgatcctcccgccttagcctcccgagtagctgggattacaaggtgcccgcgatcatgcctggctaattttttgtatttttagcggaggcggggttttcccatgttgcccaggctggtctcaaactcctggccttaagtgattcgaccgcgttggcctcccaatgtgctaggattacaggcatgagccactgtgcccggcccattttgacatcttttctatggtcagaaatgataatagccatcttgtaggcacatgtttaaggaagatatctctttccatttctctaattgaaaatcttggctgggcacggtggctcatgcctgtaatgccagcaatttgggaggctgagatgggcacattgcctgagctcaggagtttgagaccagcctgggcaacgtgcccaaaccccatctctactaaaaatacaaaatattagtggggtatggtggcgcatgcctgtagtcccagctattcggggggccaaggcaggagaatcactggagcctgcgaagcggaggttgtagtgagctgagggcatgccactgcactcgggcctgggtgacagagtaagaccctgtcttaaaaaaagagaaaaaaagaaagaaaaaatctcattaagtgcttctgtacatttcgaggaaggtgaaaagtggccccaaacacactataggtgtgtatcaccacacccagctaaataaaaaatattattattattatttttttgagacagagtctcgctctgtcacccaggctggagtgcaatggtgcgatctcggcttattgcaaactctgcctcccaagtttaagtgattctcctgcctcagcctcctgagtagctgggattacaggcatgcagcaccaggcctggctaatttttgtatttttagtagagacagagtttcgccatgttggccaggctggtctcaaactcctgacctcaggtgatccgcctgccttggcctctcaaagtgctgggattactggtgtgagccaccatgcccagcttgaaactaacttttgaattaaagtatctaagagctgggaggatgttttttgttgtcatgatttgacaaaccacttgctatactgtaggaagtatgcttattggtaagatctgacagctttaggcagcatgaagtcaacacatctgttacaaaaatgacccctttgttctcccacaggatatttagttgcaactgctgaatcaagaaatgtaacatactcaatgtatccatttttttattgctgctataataagttaccagactgtactgtttaaacattaaacaacataaatttaatatcttacagtactgtaagatagaagtctgataagctctcactgggctaaaatctaggtatcaacaggactgcattcctttcaggaactattattaactaaggtccatggttttatagtttcatgctttgtgttactgtatatttttgccaaatgcatatcatatatccaccaatacagtgtcatatagttttgtttgtttgtttgttttgagacagagtctcactctgtcgcacaggcttgagtgcagtggtgcgatcttggctcactgcaacctccgcctcctgggttcaagtgattctcctgcctcagcctcccaagtagctgggactacaggtgcacgccactgtgcccagctatttttgtatttttagtagagacggggtttcaccatattggtcaggctggtcttgaactcctgacctcacccaccttggcctctcaaagtggtcggattacaggcatgagccaccgcgcctggccatacagaatagttttactattcatccctcctcctcttccctataatcctgggcaatgactcatctatttatattcttcagttttgccttttccagaatgtcatatggttggaattatactctgtagcctcttcaggttggcttctatggcataacaatgtgcattgaaggttcctctgtctttttgtgccttgacagcccatgtcttttgattgttgaatgacattcctttgtatggatgtaccacagcctgttttgtgaccgctggtttgctatttgttttaggataggaccatgagactgtggaatattgaagaaattgatgaaattcctttggtaatcaagtacaaaaaggccgtgggcttaaagttgaaacaggttggtattgggtaaaattaagcccagtgaaggctttcgttagttccctctataaattaatttatcatttgaatgaactttgggcacctggagatgcaatcgtgaacaaacagactgacatttttgccccaggggagcttaaattctaagagaggaaacaaagaggaaagacacaagaaaaatgtgtagtaagtctcatggtgataagtaattgacagaaaaatacatagcaaacaggagtaggagtgctggaggttgcaagattttaaagggtggtcaggataggtctcattgaggactgacagctgtgtcgacttgaaggtggtgagggggtgagccatgcagatatttagaggaaagaacttccagctggatgcggtgtttcacgcctgtaatcccaacattttgggaggctgaagcaggcggatcacctgaggtcaggagttcgagaccagcctggccaacatggttaagtcctgtctctactacaaatacaaaaaaattagccaggcttggtggtgcacacctgtactaccagctactcgagaggctaaggcaggagaatcccttgaacctgggagatggaagttgcagtgagttgagattgcgccactgcactctagcctgggtgacagagcgagactctgtctcaaaaaaaaaaaaaaaaaaaaaaaaaaaagagaagaaagaacttcccagcatagagaacagccaatgcagagagagcctgagaggcaggagccagcctggtgcatcggaggggtggagtgagggggcttggaggggatgagacctgcaggagcactggtcagtggaggaatggccgggtacacagctgggcactgcgtcagcctcctaccctgggcaggtccccagtgccccacttcccatgcaaaaggcttaggtgcctgcgcttctctagtgcaagagcttggtggtcaggccagcatattttctgcttcaccaggcacagctggggctggccacagaggctgtccctgggcagtggaggcaactctccgctggagcctctctgtgcacacacctggctgctgccttggagtgcaggctgggcccctttaagtccttccctgggaatcctggagctgcctagacttggcctcctctcagaaggttcggctgggagccactgcttctgggaatggctaatttgggagccgcactgcaaggcagttgtgtgaggggtgggactcacatggaccttgtccctgtttggcccttaaactgtgaaagctgacttgctacagagcagtgatggcccttgtttttcactggccacctagggcaaggcctgggagcctcctcctctgtgagccctgttgttctggggttggaccgtgggatgtaggaatgtaggataaggtaggtaaaggatcaaatttccttttttctttttatttcttttttgagatggagtctcgctctgtcgcccaggctggagtgcagtggcgcgatctcgtctcactgcaacctccgcctcccgggttcaagcgattctcctgcctcagcctcccgagtagctgggactacaggcgcccaccactacgctggctaattgttttgtgtttttattagagacggggtttcaccatgttggccaggttggtctcgaactcctgagctcaagtgatccgcccgcctcagcctcccaaagtgctgggactacaggcgcaagctatccgcacccaaactgggatctaatctatttcttgcaaaaaaggaaaagaaagaggcctacctgaagctgaagcaaggatgagcctgctgcatttgacttgctctgaatcaatcaacatgagaagcctgaggccaggcttccccgaggcctgccccaggtagggtttacccccctctccagcaggcctcagtgtcctggagtgggcagaacagcaaagcccaggggctgggagagccagggcaggggcgcggccaccttgcaggctcttctccaggggaccatgcatggtgggaacccctgaggggcctctgcccatggcctaggagacctcatcccatggcactcttgcttgttagtgggaagcagacgtgatgggtgagctgtgccatttgttttcagtgtactctgtgagctttggccagaaacaggctcagggacgcaggagggcacctagcacctgcatcaatctgcttcacacccctgctttgttcagaaatcttgcctacttgcgtctcatggttctgtaaaagttgggtgttctcaggatgtcagggagtcatcctcttagtcccacaattttactcggcacagaacaatggatggggcgggacactcacccccatcctcccaactgtcaaggggcttgccacgcatgtcctcaggacccccatggcaggagacatgagctggcaggagacatgagctggcaggagacatgagctggcaggacctgcttagccattggtggggaagcagcctgtgctcattctctctgcaatttccgcctttgtggggttagagattccagagaggggctgcgcccagtggctcacgcctgtaatcccagcactctgggctgccaaggtgggtggatcacttgaggccaggagttcaagaccagcctggccaacatggagaaaccccatctctactaaaaatacaaaaattagcaggatgtggtggtgcacgcctgtaatcccagctactcgggtggctgaggcaggagaattgcttgaacctgggaggcggaggttgcagtaagcctagatggtgccactgcactccagcctgggcaacaaagtgagactctgtctcaaaaacaaaaacaaaaacaaacaaacaaaccaaaaagagattccagagaggggaacccttgccttgccccagctcaaggtagctgggagaattctaatggcatgcctggatcacctctgaccagcacctcctttctgctcttttaaaatatcccatgtcagtgcgaaagatgtgacaggcctttctccatcttcaagagtgacacctcttctgaaatgttcacccaatgcgtgttctgccggatagatacaaggggcttgccagcagatacttcatcgtcatcatcatcatcggaaagggagaactcaccgccgccaaggggaagcaaggatgactgacagccacaggcccctttgagtgactccagcacaggctacctagcatgtaggtttcggggctttgcaggggctttctcttgggcccctcccaggctcagcaggcctgtcagactggggcaggacccaagccctggctggactcagcacagtgccacctcctcagctctcagcttggggagtgaacactttccgttttcatgcagaataaatctaattcctttggaaaacaagcgtgcatgtgcatctgaaaagcagtcttgctatttctaagctttatgtcttggtgctcatcctgtttgattcttggaacacatattagactcacattgtggagtctggagttgccctgtaaggtgacctgtgggggctggcaccagcagttctggagagtttgtcaaatgagtatgacaaggtgtggggccccctctgtggacgtgatggcaagacacaatgagtgcctccctggctaatgctcccagatggccacttgcccggagcagaggacggtttggttaggcaagggggtggcggtggcattgccatcacgggatgtctcacgctttctcctctagacgtcttaatttccagaaccccttgcttatgtgcagccctcttcctgctgccacggcattttgcacagcgtgcatcaatccagaaataggctgagataggagcttagtttcctattgcacaccatgctgggtgaacctttctgtgcatgctgcagggatgctgggtggatgggttggcagtgttcggcttcgtagttgcccacaggccctctggaaagtgcggagaccagtggctggtgtagttgcgtgaggacacccagaaggggtcagtgagaaactagggaggggagggccttgcctgctctggcagcagaaacccctccatgtaaggtgttggtgctccacgccagcagcctgggaaccctgaagtccacgatccctcctgagccttccggacccctcgactttcccccagctcaggatccgcggaagtagcgactcaactgaagttatagtcccgggagctggcagggccccgggtcttctcaggctgaggtcgcggggcagaatggtccgaagctcaccggggtcacagtcggaccgaggcgggtgtgcgcctcgaccggacgccaggggagccagcagcccggccgcgctggcggggccgggggttctccggagtgggtaggggctcgaccgcactgccctgagtcccaagccctgcaccagcgttccccaaaggcggagcgtcctggctccacgttggaagagacattaccgtgaccaggaagtctggccttcccaggctccgcccgctccgtgcagcccaagcttccggtctcagtctcagctgcctgtgtgaatcggaagctacactacgcgtgcgccacaacaggccgaatgtgtgcgcatgcgcgcggcccatatggtaaatagtaatgaagaatagtttaggaaagtacctgtacgggtggcgccgtggcttagttggttaaagcgcctgtctagtaaacaggagatcctgggttcgaatcccagcggtgcctcaaccgagcgtccaagctctttccatttttgctcctgcacttttgtgctctgtacccggctgcccgatactatgagggtgtgagcgggatcccgagaggcctaggtagacgggccccccaacggggcgtggcctcggccacgggggcgggtgcaggcgggcttcggactccaccttctcgggtctcaggctctgtggggcgtaggcggcgcggggacccaggcgaccgcggttgccatggtgctggctggccgtgggaggcgagcggcgggctgggaagcagctgtgcgagtccagcgaggagccggtgttcgccccgaggctgcttcctcagggcgggcggtggacgcgctctcccacgccgccttctgtggcgtgggttcctcgcgctagtcttcctggctccaagctgccacttgggggagcccacgcgggtgccgatcctcgacgttcgccgggcttagctgagcctcgcaaaggcctgaagattgcccgtctccctgcagccgcgcagtgggtgcagccttttcacaaatgcaagacctggaccggcggcgaggccaaggggaccccgtgtggagggatgcgggactgagtccggttagcgtgatcctcagtccgatgactgcgtggaaactccaggccaggcaggggactctgccccagctgcagacggccgggtgtgggctgaagccagctgcctgggctggggttggttgctcagcgctggggttctacccacatttgtatgtgggaacctattcctgagcaagtgcattcgaggctttgggggtggtggggtagggtggggtgaggcattggagtttttacaaacattctccagggattcacatgtcaaacccgacaggacagtcccagtgcagaaattgcagtcatggcataggctgtgtagtcaaattcacctgccccagaagcagttcctcttcctgcctcttctatggatctgggtttattgtttttgtttgtttgtttatttctgtcgttttctagtcaattctcgcgcttttgtatcttggttgtttttgactgacattgcctaggaaagcttgtaaggagactttgacgttttgcagtgctgataggagcgttcacctggatccaattagggatgaatttattggaaactgggcttgcgtcattgtggagctggtttatttctggctcatacttacgccactgcaatccagcctgggcgacagagcgagattccatctcgaagaaaaaataaaaattaaaaagtccctcattggatacagggtttgaaatcttttctccgtttccttttctctttgctatttatttatttatttatttatttatttactgagatggagtctttgtcgcccaggctggagtgcagtggtgtgatctctgctcactgcaacctccgcctccccggttcaagcgattctcctgtctcagcctcccgagtagctgggattacaggtgcacatcaccacgcccggctaatttttgcatttttagtagagacgaggtttcatcatgttggccaggctggtctcgaattcctgacctcaggtgatccgccccgcccacctcagcctcccaaagtgtggggattacaggtgtgagccaccgcatttttttttttttgagacagagtctcactgtgtcaccaggatggagtgcagtggtgtgatctctgcccacggcaacctccacctcccgggttcaagcgattctcctgcctcagcctcccaagtagctgggactacaggcgcgtgccaccacgcccaactaatttttgtatttttggtagagacggggtttcaccatgttggccaggatggtctcgatctcttgacctcttgatccgcctgccttggcctcccaaagtgctgggattacaggtgtgaaccaccgtgcccggccttctttgctttcttaatactgtcattagaagtgcaaacgtttcaatattgatcaagtctaatgtatctacttttcctttttgcttatgcttttgatgtcatattcaagactccattgccaagttcaaggtcataaagatttacactaatgttttcttataagggttttatagcttttgctcttacatttaagttttggatctactttgagtcaattttgtatatgatgtgaaggaggggtccagcttcattcttttgcatgtggattttcattcatccaaacgccatttgttgaaaagactattctgttcccaaaggtcttggcacccttgtggaaaatcaattgaccataaatatgagggcttatttgtggttttctaattctagtaccttaatctacatgtctagctttatgcctgtgccacactcttgataactatagctgtgtactaaattttcaaattgggacgtatgaggacttcaaagttgttattttcaagattgttctggctattctgggtctgttgaatttccatgagttttagaatcagcctgtaaatttctgcaaacaatccagttgggattttgatagaaattgcatttgatagaaataaatcatttggggggatattgttatcttaataatgttaagttttctaatccatgaacatggaatggctttcaatttatttaggtcttctttaatttctttcaacaaggtttttagttttcagagcataagttttacacctcttttgttaagcacatttctaagtattttctttttttgataccattataagtagattttttttttttttgagaagcagtttcactcttattgcccagactggagtgcagtggtgcgatcttgactcactgcaacctccacctcccaggttcaagcaattctcctgcctcagccacccaggtagctgggattacaggcgtgtgctaccacgcctggctaatttttgtatttttagtagaggcagggtttcaccatgttgcccaggttggtctccgactcctcgcatcaagagatctgcctgcctcggcctcccaaaatgctgggattacatgcaagagacactgtgcccagcctgggtcccatatatttcttgctggggttatttctagatactgtgaatgggataattccattttttaaaaattgcatgctcctgctaaataggaatgcctttgatgtttaaatgtggctccttaaagcagccctcttgcctgactgtcttgactgtcttattactgctgattgcttgtttgatttttgggcagattctgaattgtgcaaattgggatggtgaatgataactttgatcttaaagggaaaaaaaggacaacttacaaacaagaaaaagatatctacaacacatataagtgacaaaataatttttagcagaggaagggcccaaggggtatagcaaagcagtgaaaattaccgcattctatcagaatctgaaaagctgggttatgaacaatcccagccttcagtatttatccaaaataaatgaaaacaacgtccataagaaaatgccacagatgctctcaatacaatagtaaaaaactaggaacagcccaggtgtccacaggagatgaataaactgtgggttatccaggcaatggaccactacacagcaagagaaagggatgggatgctgacacttacacagacgtgggtggaatctcacgtcgtgtacagtgaaacagtacatcatttatgatttcacttacataaagctctaggaaatgcaaattaatctatagtgacagcagagcaatggttgcataggtggcagagattgatttcttgaaaatgggtacaaaaagaccttcgaggggttgatggaaatgctctttattttgtaggagtttgggtgtgtgtttatcaaaactcattaaattgtatgcttaagatctatgcatttcacagcacaaaagtcaatctaatctaaataaaaatattaaaggccgggcacagcggctcataccagtcatcccagcagtttgggaggccaaggcgggtggatcacttgagctcaggagttcaagaccagcctggccaacatggcaaaaccctgtctctactagaaatacaaaagtagccaggcatgatggtgcacacctgtagtcccggctacttgggagtccgaggcacaagaatcgcctgaacctgggaggtggaggttgcagtgaactgagattgcgccactgcactccagcctgggtgaaagagcgagactctaactcaaaataaaataaaataaaaaataaaataaatgaataaaaagagttcaagactggcctagtcaacatagcaagacttcctctctctaaaaaaaacttaaaataataaaagtcatgttgacagcagtctggttcgtcttcccagcctgtccccaccagctccacgtggatttaactatttcttgcacatggcctgtgctcttccagtagggcagagcctgcatttgttgggcggtggactgtcccatttccctctgtttctacctcccatgcaactgtggcctgaagggctccagacagggaaagagaggtttcatctgcgctaggagggcagagatacgcacataccatcagctgcttccaggagagggtttcagctttaatgactgagaggtggcctcagccttggggaagaaccctcctacagcctctccggaggagcagggcctcctcactgccggggaaggctgagagtgtggtctccagtatgctgagttctcagctgcaggaggcagaatcactcatccatttccctcacccacctctgttcaatgatggtgatctttccttttctttttgaaatggagttttgctctattgcccaggctggagtgcagtggcacaatctcagcttactgcaacctctgcctcccgggttcaagcaattctcctgcctcagcctcccaagtagcttggactatgggcatgtgccactactgcctggctaatttttgtatttttagtagagacagggtttcaccatgttggccaggctggtctcaaactcctgacctcaagtgctctgcccgcctcagcctcccaaagtgctgggattacaggtgtgagccacagcgacaggccaattttttgcttttttaaagacagggtttcactcactttgtcgtccagtctggagtgtggtgattcaatcacggctcactgcggcctctaactccagggctcaagccatcctcctgccttagccttccgagtagtggagactacaggcatgagccaccatgccagggtaatttctaatttttttgtagagacagggtactgctatgttgttcaggctggtcttaaactcctgggctcaagtgatcctcccgcttgggcctcccaaagcactgggattgcagtcatcagccactgcgcctggccagtgatgggtgagttttataaatcaaaatgtaatggtgaatgtatttgtacaaactatatttacaagattctatcatttaatttaaaaggttgactggtgtggaaacagaaacatcatttcgcaccacattttatttcctacagtcaattagattatactttaatacaaaaaactaattaaaatttaatcgaactttagcaaacatgggatgtctatgaagtgtaagacaatttactacatgttctgggggctgaacaggagcgtgcttttggtttctaccagaagcggtctctccctgccgcacgtccgcccctgaaaagaatgcctaggataggcaaattcaggcaggcggggagagaagggtggtgttggaattagtgtggactgactttcagcattgttttgttcttcactgatctgtgcctctgagataatgtaacaccttcttctgaatttagagtggctcctaagaagcagttgtgatcagttatttaaaaaaataaaatgatgccaaactggacactggctgggcttactatgctgtgtatggcagatcacctggggcacgtgtgcgtatctgggattgaattgcataagcaggttgggagccttgctttaaggatgggttggaggccagctgatgctccaggagcctgtctgctcttgaattcctcagcagagcttctctggctcagtcccacaggcacacagctaagggtgactgcaggcttcggggtggacatctgggatggctgcccagcaggtgatgttcagtaaatccacacctaggagaatcaagccctggagacggccaggctgatcagattcctctgatgctggagtgcgcacctctgatttccctctttcagtgaatcccaaagctctttttttttttttttagatgaagtctcactctgtcgcccaggctggagtgcagtggcacgatctgcaatctctgcctcccaggttcaagtgattctcctgcgtcagccgccccagtagctgggattacaggcgcccaccaccacacccggctaatttttttgtatttttagtagagatggggtttcacgatgttggccaggctggtcttgaactcctgagctcaactgatccgccggccttgacttcccagagtgctgggattacaggtgtgagccaccacacccagcctacattttttaaaagagaaagtaaaaatgtaaaccatagggccaggtgtggtggctcatgcctgtaatcccagcactctgggaggccgaggcaggcagagcacttgaggtcaggagtttgagaccagcctggccaacatggtgaaaccccgtctctacccaaaatacaaaaattagccgggcatggtggtgggtgcctgtaatcccagctactcgggaggctgaggcaggagaaacacttgaacccaggaggcagaggttgcagtgagtcgagattgtgccgctgcactccagcctgggcgacagagcaagactctgtctcaaaaaaaaaaaaaaaaaaaaaaaaaggaagccatagatggggagagaaatttggaatacgtacaccgagatccctctaagggatctccggagttccaaatagtcttactcacttccagcgtgagtggtgttccaatttccccttggcaggcagggtccatcaccccagccagcccagtccctcccttctttgctcattgattcagaggcatggggagctcagagtggccaggagtcagtctcaacttccagttcggtggaatcagtgctgtgactcctggcggaatcattccttccttaggagctaagacctctaggccagcagaccatgagatgggaggaacaggaaacaaaattacctagtggctcactaagggtaatagtgaacggtgccattccttttccattccttgattcctggaccctcgaatcctggctagaagcagcagcgccatctatcggacgctaattcggagcttatgccgccttctgaacaaccttgctccaaccctgcaaggtatcgcctctgagctgatgctgtaactgcgtcttcaaaaggccattccaggccgggcgcagtggctcacgccagtatactcagcactttgggaggccgaggcaggcggatcacgaggtcaggagttcgagaccagcctgaccaacatggtgaaaccccgtctctactaaaaatacaaaaattagcaaggcgtggtggcgtgcgctcctcgggaggctgaggcatgagaatcgcttgatcccaggagacagaggttgcagtgagctgagatcgcaccattgcactccagcctgggcgacagagtgcaaaaaaaaaaaaaaaaaaaagaaaaaagaaaaaagccattccactgttctatcaagccagctgcttcagattggtggggaacatggcaacaccagtgaattccataaacatcgccgcacttcatttgtgggaaattgaattcctttttgtgtgtgtgtgacggagtctcgctctgtcactcaggctagagtgcagtggtgtgatccctcggctcactacaacctctgccttgcagattcaggcgattctcctgcctcagcctcctgagtagctgggactacaggcgtgcaccaccatgctaggctaatttttgtatttttagtagagatgggatttcaccatgttggccaggctgatctcgaactcctgacctcaagtgacctgcccaccctgacctcccaaagtgctgggattacaggtgtgagccaccgtgcccagcctactttattttctttttaaaaaatttaattcatgtttcataataatcctctccctccccacttttagagacagggtcttactctgtccctcaggctggactgcagtggtgcaatcatggctcactacagcattgaactcctgggctcaagctatcctcctacctcagcctcctgagtagctgggactacagacatgcaccactgtgcctggctatttttttttttttatagagatgggggtctcactaagttgcccaggctggtctcaaactcctgagctgaagtgatcctcctgccttggccctctaaagtgctgggactacaggcgtgagccaccatgcccagccctttccccctttgtaatgttgtttcatttggtttgggccaacataacactgttcttaaataatataaaaatgaatggatttaaatacagtgattaagttcataataaagatgggctgtctgtggtggtggaggggcccacggagctccagcaagtgggtagcactgcctgcttcctattgcatcccccagggaattccagggtgtgtgtgtgtgtgtgtgtgtgtgtgtgtgtgtgtgtgtgtgtgtgtgtgtctttctctctctctctctctcagggctggtggtcttgctaccagacacctggagcccctctgccagctgctttgagcttggctgaaagtgagcttggtctgctcctctcacctgctatgattaaggaggggccactccttgggacggaggggcttgtccatggctttcttcatccacccctccagccttgcattcccacaatctgtacttaggcctcgagactcaggctgtctcagggtgtcacctttattcctgtggctctgtagtaacctgttttgtgttgctgtaaaggaatgcctgaggctgggtcatttataaagaaaataggtttatttggctcacagttctgcagactgtacaagaagcttggcactagcatctgcttctggcaagggcctcaggaggcttccaatcaaggccagacatggtggctcatgtctgtaatcccaacactttgggaggccgaggcaagcagatcacttgaggccaggagttcgagaccagcctggctaacatagcgaaacctcatctctactaaaaaatacaaaaattagctgggcgtggtggcaggtgcctgtagtttcagctactttggaggctgaggcgggagaattgcttgaacctgggaggtggaggttgcagtgagccaagattgcaccactgccctccagcctgagcgacagagtgagactgggtctcaaaaaaaaaaaaaaaaaaaatccaatgaaggcggaaggcaaagggggagccagtgccatgtggcaagagaggaaggaagtgggaggaagtgccaggctgttttaagcaatcagctctcactcattcattactgtgtggggggcaccaaggcattcgtgaggaatccaccccaagacccagacacctcccacgaggccccacctccaacactggagggccacatttcgatatgaggtttgaaagcgacaaatatccaaaccatatcaggcaccaacagggttaaataacaaaccttacctgttagcccatcttggggtttctgatgtgcttggcttcattaataatttagtgaggtggacgagattggactgactcttcccccaaatcaatacacaaatgattattgcttgagggtacttctgagtgcttcagcaagaccgagggagctttttggttgaaaatgggaactgcactcagcactggaagttcctgcagagaaggttatgtaaaccaaggggcgacctgctgctaacattttcattgcaataaaacactttttttttggaatggtgcttttatgacatacttactatcaccgtttcaggcctataattttaaaattactgcacaatattgaaggtgaaatgattttactgccgctggtctattaaggttctaggaactggctgcagcttggagagtgtctatggctggatgcacttggacacaccgtgccgactgccctggacgtgcctgcagacacagcaggctggatgggtgcactgtggctgggtgtgtctgggcactcccacaggcgagcaggcattcagctctgagctttgcagttcccacctggactgaccaaactctaccagccctcctgccccctgcccccccgccactgccccgggattgcagaaatgctaggaagctgcactgaagtcaaagcagcaaccccggccagctgtcccaccccactgaactcaggaggaaatgctgtgattgctaccatatatgttgccagtttatttgtagtattttaaatttatttttatttttattatttatttatttatttatttattgagacggagtcttgctctgtcgccaggctggagtgcagtggcgcgatctggactcactgtaacctccacctcccgggttcaagtgattctcctgcctcagcctcccgcgtagctgggactacaggcgcgcgccaccaggcctggctcattttatgtagttttagtagagatggggtttcaccatgttggtcaggatggtctcaaactccagaccttgtgatccgcccgcttgggcctcccaaagtgctgggattacaggcgtgagccaccgcgcctggccttaaatttatttttattattattattatcattttttttttttttgagagagagagtcttgctctgttgccaggctggaatgcagtggcacgatctcggctcactgcaacctctgcctcccaggttcaagtgattctcctgccttagcctcctgagtagctgggattacaggcctgtgcctccagacccagctaatttttgtatttttagtagagatggggtttcgccatgatgaccaggctggtctcgaactcctggcctgaagtggtctgcccaccttggcctcccaaagtgctaggattacaggcacgagccacttcttctggccttgtatttttgtttgattttgttttgtttgtttgtttgttttttatggtaaaagacacatggaatttactattttaaccctttgtagctgtacagtttagtggcattaaatacattcacattgttgtacaaccatccacatatccatctcaagaacttttaattttcccaaactgaaactccttacccattaaataactctctatttgcccctcctctcagcccctggcaaccatcattctgtttattgtccgtatgaatttgactatgcaagatgcccctgtaagcggaatcagacaatatttgtccttttgtgactggcttatttctcttagcataatgtcctcaagtttcatccatgtcatagtatgtgtcagaatttccttctgttaagactgaataggtggctcacacctgtaatcccagcactttgggaggccgaggcaggtggatcacctgaggacaggagtttgagaacagcctggccaatgtggcgaaacactgtctctactaaaaatacaaaaattagccaggtgtggtggcccgtgccggtaatcccagctactcaggaggctgaggcaggagaatcgcttgaacctgggaggtggaggttgcagtgagctgagattgcacaactgcactccagcctgggcgacagagggagattctgtctaaaaaaagaaacccaaaaaaacaaagaaacaaaaaacggaataatattccactgtatggatggaccacattttgcttattcattcatcatccatcaaggaacacttggttactcccaccttgtggtcattgtgaatgatgacgcaatgaacatgggtgtacaaggatctgtctgagtccctgctttcaattcttctgggtatataccctgaagtggaatggctggattacatggtaattccatttttaattttttaaggaacccgtatactggtttccacagtagccgcaccattttacactcccaccagcaatgcacaaaaatgtcaatttctccacatccttgccaacatgtgttgttttctgtgtattccacccctgccccccaccgtagccatcctaatggaggcaaagtggtatctctctgtgattttgatatttttaattcaaataaaccttagcacctgtattagtccgttttcacactgctgttaaagacatacccgagactgggtaatttataaaggaaagaggtttaatggactcacagttgcatacggctggggagtcctcacagtcatggtggaagatgaaggaaaagcaaagagacttcctacatgtcagcaggcaagagaggacttgtgcaggggaactcctctttataagaccatcacatctcatcagattcattcactatcacaagaacagcatgggaaagacccacccgcatcatccaattacctcccaccaggtccctcccacaacacttgggaattgtgggagttacagttcaagatgagatttggatgggaacacagccaaaccatatcaacaccctttctcaaaagctccattttttctcttcttttctttcttgtcctttcaccatcttactccaaagttggacattaacttctgttcagaaatcccacagtcacaggccctcatgttaatttctacccaaatggctgagcttttcaaatgtcattggagaaacatggattttaatgtatacgatggccgggtgcggtggctcactcctgtaatcccagcacattgggaggccaaggcgggtggatcatttgaggtcaggagttcaagaccagcctggtcaacatggtgaaacctcgtctctactaaaaatacaaaaattagctgggcatggtggtgcatgcctgtaatcccagctactcagcaggctgaggcaggagaatcatttgaacccaggaggcagaagttgcagtgagccaagatcacgccattgcactccagcctgggtgacagaatgagactctgtctcaaacaaacaaacaataataaaaaaatgtatacgagagcaaaatagccatttagaagacatcatcctgtgaggcacctctgctagggttccgggagggatcaaggctacaacaaaccatgatcacaccactgcgcaaagcatttcaggacagtttctgcccaaggagagactgggcagacagaccttcctctttcactgctggccccaggtgcttgcagttctctccaagggggccctggagacctgggggtccatcagtatgtccatgtgctggagcggctgctggcaggatcaagaacttccctccaaacgctctctggcttgactattcgcctgatggaacaggcagaaggatagaaattagctctggggggagcggaaacattctgaggccagagcaagctggtgatgagtggggcttggagaaggtggcaggcagggctgttcacaggatcatgcagcttgagctaaaaactttgaagtctgttctggagcattttcagcagtggggatgaaccaatttgcatgttaaaaacgtgagcaatgaattgagaggcaagggaccacatggagggaggcctctgtggaggtccaggagacaggagatggtggctgggaccagggaggtggtcacggtgatggagaaaggtgggtagatttgagatacatcatggggaccagcaggttgtagtgatggattggatgtagggagattggagtaaaaatgatcaactcagtaatggacgtggccatgaactgagtagggcacagtagagaaggggcagatgtgggggtgaggggtgtctggtctatggctcagctagaataatgagaggtttgccctcttggaagtcacctgtgataaacttgggcataaaggtgatcataaaacaatttttttcagttttatttgccaaagccacttttggcctttgaccttcaaatagattgtaggatttttgttgttgttgtttttgagacagaatctcactctgttgcccaggctggagtgcagtgtgcgatcatggctcatcgcagcctcaaactcctgggctcaagcaatcctcccacctcagcttcctgagtagctcagactacagatgcataccaccacacccagcacattaaaatttttttttttgtagagccagggtcttgctgtgttgcccaggctggtctcgaatcctggcctcaagtgatctgcccacctcggcctcccaaagtgctgggattacaagtgtaagccactgtgcctggctggttctagttatttgaaatcaggaaagacactgaccattcaacacagagtcctcttcattagtgtctggtaagcaactggataagagagcgcttgagtttgcatctgcctgtgggtgaatgttgggggaggatgtgggactctcctgtgtcattggtttcttctgtgtcccacgagggctcggggtatgtggctgatgagtgggcaatggtggtggccctctcgtatgggatggagtggggacttacatgggatgcctctgtgtcccttccgtctcctctctgcatgtcctgtggctcctcactcctgcagcagattcctgaaggcgtcactggcccacagtgactgtgacagcagctttgcttcctcctaactgggaaggccagcttcttgccaggaagcccctgctctcatgtctgagccctctgccccaccactgctccctcacctgccccagccagtcagttcccatattctgggtccatgcccaccatctccttcccagtactgaattctccaatggttagaagcttttgggttgtgatgaatagacacgttctggatatagcttgagtcaatgagggaggtttacgaaaaggtttcagaggtggagagacccaggcgattgcagctagcgtggaagagtgttgaagcagagacaggaataccaggaacctttccagatgtggtgagagggcggtgggggagaggactgggccagagctgcattggggacccccagcaagggtcttgcctggcacagcaacctctagggggcactagaccatcatgagacaaacgggaaatggggtgtcagttatgggccggggtctcaatatgggccgggagtaggatagggcagtgaggcactcaccttgggcacagaattgaaggaagtgccaaaaaactcaataatgaagataaatcaactttaatgcaaattttttgtgtgtgtgcaatggggacagttgtttccaatcagcccaaggttcctgggtaccttggccgtttcttgccttatgggtttatgagggttcacaatgggatgtgcatagattggggagcatggagatttagatatagtcatgtgattgtagagcttttcttagcctttccacttggttcaaaatatgggaggatattttgataagtgtgtctaggggctcacatttttcttttgcttcaggctccaacatgattcccatattggtcattggtctggaccctagattccttacataacgtgcaaaacatgcattgaagcaggcagcatcttcaacaaaaccgcatattttggccaggtgtggtgggtcctgtctgtaactccagcactttgggaggctgaggcaagaggatcccttgagtccaggagtttgaggttgcagtgagccgtgatcacaccactgcactccagcctgggcaacagagcaagaccttgtctctacaaaaaaatgaaaaaattagcctgacatggtggtgcacacctgtcatcccacctacttgggaggctgaggtgggaggattgcttgagcccaggagtttgagggtacagtgagctatggttgcagctctgcactctagcctgggtgaaaaagtgagactgtctctaaaaaaactaagaagcagcagcagcagcagcaacaacaacaacaacaacaacaaacgaacaaaccgcagatccaccctaccattgcccctgcctctgttgagcatttttgccatgcgtaaataaatgcctgctcatccgcagtcagcagtctgaggaaattctgaaaccaaattacacataggctagtgctctatgccatcaatctgtaatgtatcttgttatttgatttttacgtcctttaatacatttcctaagaagtctgctttggaaaaatcaccaaaggaattagaagagagagaataagaaaacccagaaaaactaaaaggatttttcttccccccattttttattaaaatccaatcaacctgcacagtgcgagtgagtgagtgactgtctacgctttcactaacggaccatcagtttctctcaaccttctctccataaacggagaatatcaaatgagggtctgggggtgttagaaaagggttgggagcctcagctcaggttggtgggcccgctgtgccatggagcctttggggacctctgatttcacatccgtcttggccctaaatggccttctcaaaccttccccctgtctctcctggttcttgcctcattggactcaacctcttggtgggcagctctccagagggcacccccagcctaagaagcaggcctcctcccaagtccccagcctcacgaggatagtgggtaacagggtgggctcagggggccctgggagatctccagaggcctctggtgtgttcaccaatgtcccctgacaggtcttgcttggcacagggggttcctcttagagacgtgacagggcacttggactgtggcaaatgaaagaagcggaggggcaggaacagggacaccttgcgaagaagacaggccttagccttgtgccacccctatgaggtccctaagccgtcctctctctcccaccttttcccagtcctcgctccccggtcctcctcagcacagccggctccaggagggatcaattcgtgggcccgggaggaggccaggcgagcaccggctgcctggagcactgggctggagcgcggggagcgcggcggggggcgcgggcggggcggggctggtgcgcagagctgtccagcaccccgaggcggggcgtgcgcccccggcccgccccagccgcctccgcccgcccagccagcgccactgcggctcggcgggcgcgtcacgtggctggcgcagcgcggcctccaggctccgggcgcgggcgaggggccgggcgggaggactgacagacccacggacgctctaccggcggcacccggccgggcgggctgggcgcagcgcggggcggcccggggacgccggggccgggcgggctgcgcgccgcggggcatgggcgcgccgggggtccccgggcccaggccggccgcggcggggctcccggggcgcgggggcagcggcgggcgggggtcttccctggcggccgccgctgagcccccgcagggcccgtgacgccgcggccgatgtggccgcgcgcgccctacgggcctgcaccgccaccgcacaaagacgcctcgggagccgccgcctgcacccgggccgcagcagccacgccagccggagcccgagccctagcccgagcccgagcccgagccgcagccagagccagagccggagccgcagccggaaccggagccggagccgcggggcaggaggcggcgcccgcgggcggccgggcccggcatggagaagcgcgcggccgcggggctggagggcgcgccgggcgcccgggcgcagctggccgtcgtctgtctgggtgagtgggccgcgcgggccgggcaggtccgggtcccccgcatggcagtccgcgccgcgccctgaccgacctcctctccggccgcggcatcccgagccccccaccgcggtggctcccgcgcggagacccagagaggggccagcaccgcttgcccgcctggccccgggcctgggagggcgactctggtggcgcagccccggctcccgccccgctcggagtagcgcccggagcccgggctgagcgctggcaggaggcccttcgtgcaggcggcagccttcaacccggcccgcccgcgctgagcctggagacgagggggccccgggagctggggacaaaggccaggccggctgtcccctgaagaagaaactgtttccggcccggagttggggtgggggctggtgtaagccgcagatggggactcggggtgcggggcagggctggaggagggtgccagtgtggaggcggcttccaggggactcctgttttccctttgtgtctctcagcccccaggcaggcctgttcagtttaggagggtgcttgggttgggccagggaccggtcaaggccaggcatggggtgggaggggctcccgccctgtccgggagtttttctgtccagctttccagcgctctgtgtaggcgagaggaggagttaaatccccaacccacatggctcctttatttactgtgatgaaggagggaggccattataagaactgggggtcattaggggacaccctgtgatgtcaccagtgagggctctgtaacctgacaggtttgctgaagccactgaaatgacaaagtaatcacccccaggcctcagggagctccgaggctctggcaggcccttgccccagctgtgtgagcctggctcagtgggaatgtgccattggggagcattgagggtgtaaccccagcgcgcccaccccaacctcagtgcggggtcatgtgtgctgggctctgagctgctgggtgctggcatccctggtgagcagagcagggggacaggcgctccatgcttaggagctttggcctggctctgtccagggggcctgggtgtcctgggtgggggcagcggttcctgcttcctggccaggcgggatctgacacacatcctgaaccccgggaagttgggtttccccccaccccccgactctgggcccgtaaccccccgggccagagcagaaggtgaaagtaagggccaaaccccacggaggtgggtgcttgaggggtggctggggagttctgctttcctcctcaaagtcagcttggcacgggggaagaggatggttccgtcactagctgcgtgccctgtaaatggggattatcagaactgcctcccctcctgcctctgctgctgctgggcgagcaaagccccttggtagggggaagcccttcaaagttgtaggagcaggccagggtgcggtggcaggtgcctgtaatcccagcactttgggagaccaaggcaagagaattgctggaggccaggagtttaagaccagcctgagcaacacagtgagacctcatctctacaaaaataaaaaataaaaaaataaccaggcatagtggtgcacacctgtagttccagctacttgggaggctcaggtgggaggattgcttgagctcgggagtttgaagctgcagtgagctatgcactccagcctggataacagaacatggaggcagggaggtgggggtgaggtggtagggaccctcttgatgggcagtcttgggctgcgctctgggccttgccctgtaagaggaaggggaccagcgggccagccttgggtttagctgtggtgtccctcatgggctgctgctggtccccagcaggtatgtgggacccctgaccctttctttgtatctcccacagtgaacatctttctcaccgggagactcagcagtgcggttcctgccttaggtaagtaagcactttctctccttcctccactccttcagtcccttttgggtgagtggtccctgaagacaggccttcagggtcctggcactaccccgagttcctgtgtgcatcttttctacatcacaaaggagctgtttggctttggacaggcttcaacttgtctgagcctcagtttcctcatctgtaaagtgggtgaaataacaaggtctactcaaaacctgtctcttagtattccatgagccagtgaggcaagctcttagtgtggtgcctggcacgtggtggctttataccaccggcaagctgccgagggtcccgtggaattgacatcttgtgcctcattgcaggccatgagcttcctaggatttaatttataggagtatgactgaggggtgacacagagaggcccatgccagggaaagaaggctttattaattttcttgaaaggaggggacatgccacgccatgcagggccacctgggaattactagatttggacaagcaggagcaggggtggaagaaaggtgtaagttagaagctgcatcacagcttccgtgggaaagtctcgacatccaggtgctgtggctcacgcctgtgatcccagcatttgggaggctgaggcaagagaatgcttgagccctggagtttgagaccagcctgagcaacatagtgaaactccatctctacaaaaaaaatctgaaaattagctgggcacggtggcatgtgcctgtagtcttagctactcgggagactgaggcaggatgattgcttgagcccaggagtttgagattgtagtgggctatgacggctccaccgtgctccagcctgggtgacagagcgagaccctgtctgtaaaaccaaaaccaaaacctgaggtcaaggtgcagcccgggagaacaatgggggcctctgacttgttcgttgcctgctgctctgctcggtggggcaggaggtgcctgggtttctagttctgtgcagggcccggcttgctggagaaaggacccggagctgtcaggcagcgggacccctgctgtggtcaaaggggaggcccagggtgcacagaagctgtgctcactggctcctctggcaggcttgggcctctttccctctctctctgccctgagctgtgctctcaggagcccggcctcctctgatgcttcgggctggctcaaggccgggccttgctcagcgctgacctagccccagccctgtctgctgtcctggtccacacaactgatggaggcccagtctcccatcccaatttccaggaaaaggctgactggcccagcctgggtcagatgtctgtggccatggtagagtcaggggaagggggaatgagggtgtcacagcttatgaatgtgagccccaggacaccctcctgctggtgggtgtgtcaccccaaatgtgtatatactccactttcagaaaagtgcttccctggggactagggccagtcatggagcttgggcgaggaggacactgtccaggtccttgcgtttggttgtccttagctgtcaagacctcaggccccagcagggtccacgttgccaaactccaacggctgctgttcacccctggtgccctctgtgatgggagctgcacgcccagcgcgcaaggccatgggtggtgatctgggaccctagctgtcctagagtccacttctgacacctccagcattactgaccacctgcaggtggcccaaggtacccacctcccaccacagctccatgactctgcatttccagagctttccctgggattcctgctgtgtgggaccctggattgggaaacattcccccagccccttctccaccctaactaggctcagttgctccagagggtctagcagggctacctggggacctcacaggtttttacccctcagcaaaccccatcctaagcccaggtatgttgggccctgactggtcagaacacctcctgcatccccccagcctctgggctcagccctgaagctactgtggctccaacggggagggcctgggcaggggcttcatgcagtttgcaggcagctggcagcttccccggcacgtctggggtgggactcccagctccccgtcgtcggattacaccaggcaggttggcgggggtattgatcaactttggaaattggatctgcaaattgtgctttctcaggccttgcagtgtcctctcaggaatatttgatgactctttggaccaggaaaggacactggcccgaaagtacctggtcattccttccctacttgtgtgggccaccatggctccgagggcccaggccatcttctgcctgagagaagtcaggtcacctccagctgaagctcagacagacctcttgacagcccccaacacctccgaacccctccctcttccccattatcccgcaaatcatgcagtcctcccatctgccctcactgcctgcccgctgctacacagcctgtcatgaacctcacctccatggagcattcctggagatccccctcctcattggcaacccctgaccctgtgccctaccacatgcacgtctgcctcaggtcaagcagggttcttgcctaggctgggcatggtggggcacacctgtagtctcagcactttgggaggctgaggtgggaggatcacttgagcctggaagttaaggctgcagtgagctgtgatcgcaccactgcactccagcctgggagacagagcaagatcttgtctcagaaaaaaaaaaaaaaaaaggagtccctgcctagaacttgcagctccctgcacagagcccagcctccctcctgcctcccatcccctctgcatgaggctgggctgctgctgcacccaccatggtctctgccaacccgctttggagaagagcaaacagtttaaccaagtttccctgatgtggaaatttccggggggcccccaggggtgaggctgtttggaggcacccgttgtcagggttttgctgagaggcagggcagctggcagttgtcccttcctctgctcctgatgtggctggtggcctcccaacccctgatgaaggggtcagacataggtctatgagggagaagggttctggctgaagtgagtgggaagagagaaaggtggcaggtgacacctggcttttcccagaaagcgtgggtgagacacctggcccccaagggccccaaggagaggggcaggtctatgtctgtcccctaggggaggcctctggggctgagtaggaatggacagcgccttgccctgcccctggccttgtcctccaggacaggggacctcacaggtttttacccctcagcaaaaaggtgaacatgggaggttcccagccacgctgactcagaggctgacacttcagcttagcatgcgctttagagatgcaatgtgggggaccataccacttcagcctcactgggccttcccttctgtggaacctcctgttcggccccctccaatgggaaagatctcttcttttggatttccttcttttttttaattttttttggagaaaaagtcttgctgtgtcacccaggctggagtgcagtggtgtgatcttggttcaccacaacatccgcctcctgggttcaagcgattctcctgcctcggcctcctgagtagctgggatcacagacgcccagtaccacgcctggctaattttatacttttagtagagacagggttttgccatgttggtcaggctgatctcaaactcctgacctcaaattatccccccgccttggcctcccaaagtgctgagactgcaggtgtgagccactgcacccggtctcttttggatttcttcaccctacacctcccaaggaatcccagttcaggacctcagggctctgtgaggtcctcatggccagtagcctcacccggcaaagggaaccaggctggggccggggccactttgcatgtttgggtggctgcaccctgagactcctttctgatagtttatctcctgcccttcctggctgggagcagggtgtacagtgccctatttctggggcaggatcagaggctcattgtgggggctgcctcccagggccatgcatgagttccaggtggagaggtgctggcttgcacctcactgacctgggactgtcaagggtctgatggtgacgcagtggtggccagccttgctttaggaccaagagttctgttcttatccttgatgctctcacgagctgtccgtgggggttactggctccctatttgtcacagtcccgactcacctgggccttcatggtcctagtaggcccccaggggaaggggcttcagctctcagctcatggctccagctgcccagcaggtcctcagatggacccgtccactcagggacccacatctctggagcacctgccatgcattaggcactgtgcagggccctgggacatggcacggccctacctgcctgtgtgatgttcatccatcagtcccaacaacaaaagggaaatgctctgtggccgaggctggggggagggatggagggttggagctctgtgggggctatcccggagggcttccctgggaagggaccttggagctaggggtggaagctgaggagtccgtgaatgggataagaaggtggggatagcacccactagggaccaccagggcctccagggcaaagtcccctccaatgtgagagatcggagaggtccggggggctaggggttatgggagggatgaggcagagtgtggggcagggagggggctggcgctgctgtagtgaattgtggttttgtcctaagagcatgggaggcagccagagggctctccttcctttcctgcagctgggtgccagagagtcttgctgagaaccagagagaacttggcttgcaaggtcacggtgccaggggccagccatgggagagtgaggagagagtgtcactgggctcgggaaaggggtcgtccctcacctcagtttttccatctgcaaaatgggccctgccttcatctcaggctgttgtgagaatcagatggaccagcgtggggaagggtcagggtgctgtggggtgggaggtgtggtcaagtgcaggggccagccgcctggtcctgggagggtcagggcacagcggggcagggcaggctcaccacactgccctggatggtttagaagcagagagcatggagaatggatggattaaagcgaggcccatggggctgggcatggagggctcctcctttgagctggcgggcgtgatgctttgctcaacctgagcggtatacagttggcactccatgagtgcatgctggctcagtgctgcagcaagaagctgaggcccccagaggcctacagtgattcctgactctgcccctccctaactgtgtggccccaggcaagtcgctgaccctctctgagcctgtttcctcacctggttccgagatctacctttggcggctttgcacttgtactcaggataaaactcaaattctgcacaaggtgtgatcagatccaggtggcgtttccagccacagctggactttgccacctctcttcaggcctgttgtagtatcttcattccactgaggggttctgcgtaaagttcgtctgctcccacccccagcctatgagttccatagagcaggccttattcccaccttactcagtgtgcctaccatgcatgcttggcatgtagtaggtgctcagtaaatacttgttgagtgagcaaagcctcagggaaggcaggcagggggccatcgcaggatgggctatgccggctgggcaggcctaggggtgtgggattctccactgacccgaggccacgaggctacaccttggaggtgccggctggcaggacgggttgttggtgggttttctcccagctctgccagagatgcgggggacaggacctaggctgtagtccactgcatagggttgggggctacagctgcctcaagtctagggggccctccttggcctcccgtacacaccacctccatgaagtcacaagttgtggccttgcccttggccatggccacccttggctggactcgatcccaccatgggggaggcctgtgctgaagcccccttccccccactgcaacccgcatcccaaccaaagatgggccggcctttctcggcctcctctcccgacagcggcctgcagtgggaagctggagcagcacacggagcggcgtggggtcatctacagcccggcctggcccctcaactacccgccaggcaccaactgcagctggtacatccagggcgaccgtggtgacatgattaccatcaggtaggggcacccgggggtgtcggaaggaatcaatgtgggcccacgtgcatggggtgggtgagaatgtgtgtgtgtgagcaggtgtggagggcacacgcctgagggtgtacatgtgtgtgagcaggtgtgggatcatgtgcatgtgtgtgagcatatgagtgaggcgtgtgtgagcactcgtgtgaacaggtgtatgggtgtgtgcatgtgtgtgagcatttgtgagtaggtgtgtgtgcatgcagatgtgtgtgtgtgaggtaggcgtgtgtaggtatttgagcaggtatgtggtgtgtgcatgcatgtgaacacatgtaagtaggtgtgtgtgcatatgtgtgtgtgtgcatgtatgtgaacacatgtgtgcttgtgtacatggaaaagcccatgtcggagaagacataaaggacacatgtgagagactgcatgtgtgagcacatgtatgtgcacgagccatgcctgcaaaggtgcagagagcgtgtatgtgcgcatgcatgtaagataacaggtgtaaccatgtgtgaaccgtaagcatgtatgtgcacatgtgaatgcatgcacgcaagtgtgtccagtgctctgggtctccacgggcctctgtggcgaggtgcccaagctggacctcttcctggtttgagcctcgttcatggggtgtggggggtctcagtcactcagctctgccaggaaggcagggccagcacacaggccactgggaacacagcctgggactggtgggcatggtctgatgtctctgaggtggcagaggtgtcctctctgtcctgcaggggtggctgggggccaggctggcactgagcccagagcatggtttctggagggggccttggggaggggagtgaatcaggcaaagcccgggtgcttgagctgcagggacatgcagagggaaagggggccaggcagtgagcggtggtcctggccaggggtggtcacagggacatttggctggggagtcactataggttccatctgccatagttttcctaaatgccagagcccaaaaagcgcaacccctgacttactccatagctgcaatgcgtgaggatgtgatgggcatgggcagggtctatcctagtctctgtgcctcagtttccccaagggccaggtggttcagggccagtgtatctccggagatgacaagctgtcaacctgctgcagccttagccagccccgtgggcagtctcaccctcacttcccatgcctgggactttgtgctgggcccatcccagtggtcccgaggtggagggttctgggcccttgggccactgcccttttggggagggtgtcggggcagggggctcttgacttcctgctccacttcggcttcgggctgggggtactgtgtgcactgatggagggaaggggagccgcagcagagctggaaatgacctgcgtggatgtcgcaattcttcatggagcctcccgtgcacacctggatggggacagtgtggggacagagtggctgggagtggaggaaccaggcagtctggaacatgaggagtgggggcagccggccgggacagggctggctgtcctggccgtggctccagcctgaccactccctgctggtcctcggccatggagatcccacctactgcctcatgtctgggtcctctccgcccccccgcagcttccgcaactttgacgtggaggagtcccaccagtgctccctggactggctcctgctgggcccagcagccccaccccgccaggaggccttccgcctctgtggctccgccatcccacctgccttcatctctgcccgcgaccatgtctggattttcttccactcagacgcctccagctccggccaggcccagggcttccgtctgtcttacatccgaggtgatggaggctgcagggcaggcaggacaccacggagcacaccgtgcatgcccacaggctcccggcccacaggggcggcaccctccacagggccccggctccctgtgggatgtcccctgaccgccctgtcaatctcaggacagtggcaggactgggcatgcggatgccttggacctctcaaggtcactggccccacttcccagtcttggctagtcctgggaactcacccctaaccccaggctcaggtcagggacagagcccaccctggtgttggaggggtctctgctgccacagtgatggggaaccacctgcccgcttttggccccaggccccctggccgaagggaggctcttctgtctcctgactgtcccctgctacgtctccaccccacagggaagctgggccaggcatcctgccaggcagatgagttccgctgtgacaacggcaagtgcctgcccggcccgtggcagtgcaacacggtggacgagtgtggagacggctctgatgagggcaactgctcggcgcccgcctccgagcctccaggcagcctgtgccccggggggaccttcccatgcagcggggcgcgctccacgcgctgcctgcctgtggagcggcgctgtgacggcttgcaggactgcggcgacggctcggatgaggcgggctgccccgacctggcgtgcggccggcggctgggcagcttctacggctcctttgcctccccagacctgttcggcgccgctcgcgggccctcagaccttcactgcacgtggctggtggacacacaggactcccggcgggtgctgctgcagctggaactgcggctgggctatgacgactacgtgcaggtatacgagggcctgggcgagcgcggggaccgcctgctgcagacgctgtcctaccgcagcaaccaccggcccgtgagcctggaggccgcccagggccgcctcactgtggcctaccacgcgcgcgcccgcagcgccggccacggcttcaatgccacctaccaggtgaagggctattgcctcccctgggagcagccgtgcgggagcagtagtgacagtgacgggggcagcctgggcgaccagggctgcttctcagagccacagcgctgtgatggctggtggcattgtgccagcggccgagacgagcagggctgccctgcctgcccgcccgaccagtacccctgcgagggtggcagtggtctgtgctacacgcctgccgaccgctgcaacaaccagaaaagctgtcccgacggcgccgacgagaagaactgcttctcctgccagcccggcaccttccactgcggtaccaacctgtgcatcttcgagacgtggcgctgtgacggccaggaagactgccaggacggcagcgatgagcatgggtgcctggccgccgtgccccgcaaggtcatcacggcggcgctcattggcagcctggtgtgtggcctgctgctggtcatcgcgctgggctgcgccttcaagctctactcactgcgcacgcaggaatacaggtgggcgctgtgcccgcagccaggggaccgggcttcttcatcacccaggcttgctgtccccgtagctgtgggtttgcaaacgggggcctggactagctacatggaggctgccctggtgcacactggggtccctatatcttggggtgtctgggtggagggtcgtcctggaatcctgttgttgttcctgctgcaggtcccgggcagcccagtcatgtcgccctccgcccactgcttctagggccttcgagacccagatgacgcgcctggaggctgagttcgtgcggcgggaggcacccccatcctatggtcagctcatcgcccagggcctcattccacccgtggaggactttcctgtctacagtgcgtcccaggtgagcccccggagggcgtgaggcccctccggggccacttgggacagtgtgcggaggaggctggtccaggggtcacaggagcaggaggcaaggcctgcgcagggtgacctgagggcccatggccaggtggggggggtggacaaggtggtctctcgggtctcaggtcccttgggggtgtgctgtctcctgcccctgagcagcctgtctgccccctcagccgcatccccccgcccctaccctgctccaccccacaggcctctgtgctgcagaatcttcgcacagccatgcggagacagatgcgtcggcacgcctcccgccgggggccctcccgccgccgcctcggccgcctctggaaccggctctttcaccggccgcgggcgccccgaggccagatcccactgctgaccgcagcacgcccctcacagaccgtgctgggcgatggcttcctccagcctgctccaggggctgcccccgaccccccagcaccgctcatggacacaggcagcaccagggcggccggagacaggccccccagtgcccccggccgtgcaccggaggtgggaccttcagggccacccttgccctcgggcctgcgagacccagagtgcaggcccgtggacaaggacagaaaggtctgcagggagccactggtagacggcccagctcctgcagatgcacctcgggagccctgctcagcccaggacccgcacccccaggtctccactgccagcagcaccctgggcccccactcgccagagccactgggggtctgcaggaaccccccgcccccctgctccccaatgctggaggccagcgatgatgaggccctgttggtctgttgaccgctgggctcgctggtgaccgccacagccccgctttgtaaccagggaatacacagtcatttctaccctgcctctgcgtcctttcttatggagaggccctccggggaccccagcggaggggctggcccctaagccagctggctgcactggtgggcgggagctgtgggactgaacggcgggggggagaagagtggagtggtgagcccgtctgcagggtcccattgtacacaagcaccctggggtctcacttctctccccccactccattctgggaacccatttccagagaagcaggggaccagagcctttttgcttcatctgccctgcagtggcaacagctgcccctagagctgggagttgtcatgaggatggggccgggccatggggacgctgggtctcatccgtggtgactattttgctcacgcctcaccctcttcctgtccagcaaggcctctggaggacctgggttgggtggctcctgccaaaccctcatgcccctggccaggcaggcgccctttgccctccctgaaggtccaatctcctgggcaccgtggaagggctggggtgtgtgcctgctgtacatgaagcccctggagttccctgcaggcctcaaagcccccaggacatgctgctctgtgctttctggggacagagaggccgaggcaccaacagcagtggccacgtctgttccatcctatctcagggcctcggtttccccacctgtaagccagggtgagactgtgggctctgaagtcctgaccttcactctgtggtgatttacgggaagaaagacaatcccagcctggagcccctgagctctcctgggtggccgagctcagactggcatcgaggggcctggggtaggggcggactgagctgctaccccatcctcgacatccctttagggcagggggactctgggtgccatggtagggagcgcctgtgtcaagcagcaaagccccctaatgtcaagagcctcctccagggcctgccacggcatcttcctggccagcaacatgtgtgcacccaccgaggtacgccccagccactcccatctgtgcccatcagggactccccatagcacgagcgaacagccagccctgtttatttataggccttttcaggaagagctagcagggcagtgctaagacaggaaacccagtccacattttagggcttccttaaacaggcttctgagagtcgtatcttttttcttttttttccagaaaaaaacaaaacaaaacttttttgccaaaacacctcctcaataaacaacatgtaaacagaaacaactgcttcagtctctacaaaaatctcattgtggcttcgagggcttgtctgtggcaggcagcagggagggtgggcaggggccattctcctcctcttcgggggcgtcctgggggtagaccacgaaacacagctcctggccccagtgtgtcatggactctgaggacagacagatggaccttggggcctgacctctcgggataggggtgacccccagctccggacacctccccttgggcaggggtcttcagggagttgctccgtcggtacccgtggttctggaaactttgggtacatcttgggaagagacatttggtggcggctgggccctgtgttcccacctcagctgctaggacaccctgctctggggtgagcctctaagagggaggtctggtctccaggccccggccccctgtgctgggtgacctgcagctgcccggctcacctgtgagtctgtgcacacactttggtttgcttctccagaacactcccagaaagaaaatgggcacccccgtaaggatgatgatgacgccgaccccacagaccataggctctgagatgaagctgaagaccagcaggaaggcccagaagaccaagtacgccacggggatgagaaggttcacctggggaagggggagcagaaacaccgatggtgcagggcctccagctgtctgtacccccgacccctgggggtctggggaattttcctcccttccctgggagctgaggcctgaagggcaattgcacccactacaccccctcttggcgacagcccagtgtgttggaggccaattcatgggtcaggccgttggccagttttgctgaggatttttcaaagtctcagcggcaccgagctccacacagcggttgcgtgtggacttgaggcttgcacttggctggaggtcagtgattttttggtgtttcacatttcaggcactgagcacttctccacttaaggatttatacacacatggggggctttgcttttagctcaggctatggtcttctgtttttgtgtgggctcatgaaatcctggcagcctttgtgaccttgaacagttcctgagtctcattttctttaatttttttttttttttgagacagggtctccctctgtcacccaggttggagtacggtggccctagcaccgctcactgcagcctcaacctcccgggctcaagcgatcctcccatttcagcctctcaagtagctgggaccacaggtgcgcaccaccacaccaggctaacccttttatttttaactttttgcagagaggaagtctcgttatgttgcccaggctggtctcaaactcctgggctccagcaatcctcccacctcggcctcccaaagtgctggaataggcatgagcccctgtgcccagtcctgagcctcattttcgccatctgtacactgggagcattcaaagctctgtcctcatggggctgctatgaggaatggctgcctcagtgcacagagagccctgagcagggcccaacactccacaaaagctggcacctcccatcccacctgcccctggtgcccactgtggatgcaggggtggctctggcagcacccggcacagggccagctgtcccagggcctcaccttgatgggcctgtggagtgcaggccgcctccagcgcagcagcagcaggcccaggatggtgacgccgtagcagaggtagttgatgaaggacacatagttgatgagcgtgtacgtgtcgcccacgagcatgatgacggctgtggccccgcactgggagaggacctggggctgacggctggcccctagcctgcctcctgacgcccctgcaggatgagccctggccccacccccaacccccaccctggaatggctcacccctgccattacccggaaggtcctgcattgccgggtagccctgcctccacgccctgcctggcccaggtcccccaacttacacagacgaggagggcggggatgggggtgcagtgtctgacgtggatcatggccagcaggctgggcaggtgcccctcgcgggctccagagaagcacagcctagcgttggggacagatatgggcactggccacatcctgggtctcagctttggacctgatgtccctcttaagctgtcgcctctgacctcctgctccgggcccagcagccccactggacagttctccccctcatccagcctgcctgcctcttgctttctttgcctcccagttgtgatcagacacttgttaccgtgtgggatcatcatcccagcttcaggcagacccctcccccggcaggtgtcccttcctctggcccacggcatgactggtgcacacctgcaccccagccttccctccccatgcccacgtctccccagtgcagtcacctggagtaggtgaacaggtaaccattgatccctccgaaggttgacagagccacggagacaggcatgacccaagaaaagtagcccagcagcttctccccgaaggtctgggtgggcacagtagagaggccatgtgtaaggccggggcaggggcctgggcaggagccagggaccgagcaggggcccactcaccacagccaccgcattggaggagagcagctcctggggggacatggccgtgaagtaggcaatgttggtgaacgtgtacacgaaggtcaccagtgggatggagatgaagatggcgcgaggtaggttcctggtgacaggcagtggagtgcgtcagcgtcagctcctgagggtgcaggacccccgagacccagccacgagagcagctcatagtctccatctcttgtgtctgctggggatgttggggcaggaaagggggcagcattgctgcccgagacacagggaccctgttgtctgccctgccccacccccacctggacacaggctggtaggatgggagatgggggaggggccccatcacatcctgaggacagggtctgatgtctgtgcagaaagataaaatcgcatacagccaaaatcagcctggaaaattccccaaaatggccccagagcccagtccacagacccagagtcttcctggaactttccagtcccagctcgctcagctgcaaaggtttactgtcgagatccctggccgagcatcagacgcagtcattggcttcatttgtagggaccatattgtgtgtatatgcataattttaggccaaatgcaaatctctggatctatttacagcaggatgatgatattcagcctttctgaggccctgcaaggggctgtgacgtgtccatagccagagagaacagggccaggctagaatgcaagccccccggctttcttcccagggccatttttgcagggcaacaggcgtgggccaccgaggaccagcccgagccttgggtggcagtggggctgggcggagaggctgcctgtcccaccagagggcctggctgcttcccagggcccagttgggggccccactcactttcgggcgtcaaccatctcctcggtgacatagttgaggaagttccagccactgaaggcgaaggagccctggaggaaggccagggccaggtgtcccacggagggcgtcatccagaaagcaaaggcattgctgggcctcagctcctcgaagtgtcctggaggcccagaagtcgggggtcagcaccatctccccagcccggcccttaccccgactcggccctaccttggaagatctggagaaggcccacgccgatgatgagggacaaggccagcagcttcccgcctgtgaacatgtcctggatgcgcgtggcccagcgcacactggagctgttcacccatgtcaggagcactgcggagggaaggcgggggtgggcgccgaggccgggacctttcacagtggaccatggccaagtccagcccaggcggcccgagaatggcatcccctatagcagctggaattttctgaagggaaatttcacccctctgtcctcctgctcagggcaggatggagcccgggcaggtggctgatctggggacagtgggccaaaggggatgcttactcaggcaggccatggacagcacccgggaggctgtggtgggggggatgcagttggggaacacgggctgcagcacgtagttggagaaggtcatggagatgacagcaaggctggtggggtacatgatgaggacggcgctccagagcagcagaaagctggaaggagcaggggcgggagtggctcaagctgcccagagcccttcccggccaacctggccctgatgtgtgcagcagggctgccctgggcctggcgcccgggggctggcgaggctgccagaggccagcaccggtccagggaggcagggttgaccttgttgaggtcttgcggctgcattgatagactgttttaacagagaaggtgttacccgtacttaaacattgacaaggctgctgtggggcaggcgctgggaacaacataggcaccaaacgcttttcttttcttttttctttttttttttttgagacggagtcttgctctgtcacccaggctggagtgcagtggcatgatctcggctcactgcaacctccacctctcgggttcatgccattcttctgcctcagtctcccaagtagctgggactacaggcgcctgccaccatgcctggcaaattttttgtatttttagtagagacggagtttcaccgtgttagccaggatggtcttgatctcctgacctcgtgatccacccgcctcggcctcccaaagtgttgggattacaggcgtgagccactgcgcccagtcaccaaatgcttttctaataacaactaggccccccattggacggaggctgtctcctgagccagggtccctgtccccagacctctcggcttcagccctggctctcgcagagtactgtggctgaagatgggtgactctgagctgtgttccccctgagggagacctatggggtgcagagactagaccttaccaagagccctagctgggggtggagagtgatggatgccccttctacctaaatcttgcctctgcagggcacccagactgtgagtctgacctgttctcaggggctttcctgcacccaggggtgggtctgcccttgggggtggtcctagcccctggccagccctccagggagaggactgcctcatcggggacatcagccatctctggatcacctgccccttgctctgcacaaccatccctgctgggcttctgggacatcctagctccatggccctcctcccctgccaggcatcccctctgcccatccccgcatgttccgtgcccagggatgaggtcctggccctcttctccctcccgaacgtcctctccaggcccgaagcatgattattctgctttcttgggtcccagcccctttgaggaccctctccccagaggagactgccacagatgcacccacagcagcgtgcaagccctggcacgtctccccatccaaggctgcccagttaagggtccccggcccatatccctcagaaccaaactttgtaaatttcagcccagacttttcctctgagccccagaccatctaggagcctctcagtagggaagtgggtgccacctccgctgcacccacctctccctctgctatgctggctgccctatcctctcgaatcaggctcctaaacgattttagaatctgcctgtacctttgcagctcttggcacaacgcagctggacaaatacaacagcttcaatcccctgatgctctccaagccccggcacctgccgtaaacccaacctgacctcacctctagctacagcagactccctgcgctcacctgggccaccacaccctctgttcacacttcccccatcctgggatgctttcctcactggtcagctaggcccggtggggaaaatcttcttcctcccagccttagggcaagcattgctttcctgggagtcctccctagatggcgcacaccgttctctttgctgtgtagctgctgcctcttgtacacactctcaaagcaaggctcatccaggccttaatcccatttaaggggctgcttcctctctgttctgtgagcagcttgagtacagggacagacctttctatcactgcctccccacccccaggctcacggtaggtgctcagcaaatattccctggtgaacgaaggaaggatagcagggtgctaaggaaaggagacctctggctgggtgcagtgcctcactcctgtaatcctagcacttgggaggctgaggcgggtggatcacctgaggtcaggagttcaagaccagcctggccaacatggtgaaaccccgtctctactaaaaatacaaaaaaattagccaggcgtggtggcgggcgcctataatcccagctactcgggagtctgaggcaggagaatcacttgaacctgggaggcagaggttgcagtgagctgagatcacgccattgcactccagcctgggcaacagagcgagactctgtctcaaaaaaaaaaaaaaaaaaaaggaccttatgcagggtatatggtaagaatatcacacttccttccttgctcctcatgcaacatatgggtttaccaaaattgaggcccctcctcgcctgggcactcacattacctagggttttcagacagtaagaatcccccctccttaagtacaaggcagggggtggggttcagagggacctctatttaaaaggagatccagagaggcccaggggcctgcaggagtgcccagcacacatcagtggggtggagtgggcctcagttccacctgccctgtcctcagaaggctgtccagcacccccacaccttctctccatccagcccccacaccttctctccatccaccccccacaccttctctccatccacccccacgacctccctaggaagccggaagcaggagtggaaactgatgccagggctcatttggccatcccattcccaagagggtgtccccctgcccgctggtgccccacactcacccagccaggcccccgaagatctctgtgacgtaggcgtagtccccgccagacttggggatggcgactcccagctctgcatagcagagggagcccagagccgtcacgcccccacccaggacccagacgaacagggccagacccacggagcctgagtgctccaggacccccttgggcgagatgaagatgcccgagccgatgatgttccctgcagggggagagatggggaggcatcaggcctggggtccccttcgcagcccggccttctgtgtggggatctgcctgctgccaggaggaagacagcccggggtgcttcccggaggaggaggaggcaggaggtgggctggaggtgttgaatgccactggcccccaagcccagcaagtgccattctgggctcatcatctgccccttcctcagtccctcacataggaaatggcacctcgttcagctggccaggcccctctgccagagacaggccctgtttgactttctcagccctccattgcccccgtgaggcggggccagcaaagtgaggaggctgaaccacctgagcgacggcagacggtggctcctcaggcaccccacaaggcccatgctcagccctcccgtctacctcagagccccaggcatatcagcatgcagccacttgtcctgcctccatccagcccactggccagagctggcccctaacacaggacttcaaccactctcctgccactttcccaccggccaaagtccagactcatggagtggctcaggaaatagcatctcctccatgaagccctccttgaccacatcaggtttgggcttctcttcctacttcaatttcctttcctttcctttctcctttcctttcctttctcttttccccttcccttccctttccttccctccgcttcctggattcaagcaattctcctgcctcagccttccaagtagttagaattacaggcatgagccaccacgcctggctaatattttttgtacttttttagtagagatggggtttcaccctgtggatcaggctggtctcgaactcctgactgcaagtgatccacccgcctcggcctcccaaagtgctgggattacaggcatgagtcactgtgcccagcttctttctttcatttagacagggtctcgctctgccaccctggctggagtgcagtggtgcgatcatagcttactgcagcctgggactcctgggctcaagagattctcccacgtcagtctccctagtagctgggactccaggtgtattaccacacccaggttttttttttttttactttttgtagagacaggttctcactatattgcctaggctggtctccaactcctgggctcaagtgaccctccctgcttggattcccaaagtgctaggattacaggtgagtgccaccacacccggctaatcaaaaaaaaattgtagagttgaggggtcccactatgttgctgaggctggtctcgaactcctgggctcaattgaccacccacttcggcctcccgaagtgctgggattacaggcgagagccactgtgcccagcccctctgctttctgacatgatgggaaacattcaggggggccaactatggtctgtagagtaggttcccaggatgagcaagactctgagtgcctgctgagccctgagctccgcaaagagggacaatgttctgggttatatgggtctcaccatctgtgcacatgaatccggtaacttcaccagagatctgcactagggcctgtccaagaagaaataaacccagaacctcagaccatatgaacaaacagccctggtagaacctgtaggtcctggtaggaccaacatcgttctctatgcaatggccacaccagaccgggtcctgagaggacgggtccatctccctcagagcgggagcccgcctcctccacctgccgggcccgcagggggctggataaggacacggttgtagctgccaatttgtattcactccttgtccacggtgctcccccactgcccccacccccagccgacacagatttccagtctggacagctacgacgccccactcagttttccagtcacatcccaggagccctaaatacatccagataaggacgaactaattcctgtgccccagcccccagaggtaagctgtacccttagtctacttctcgggggagagagagaagcgcctctctcatctagcagaggggcccaggcctgggtgggctgtaaggtttctaaagagcctttgagttccctccatccggcagcagggcctctgttctcaggacctggcggactgggatttgccgaaagccagggaggttggaagccagcgggggctgggtggccttggaaggagctgagcatgttcacgctgggagcatcccaggccctgagccacccaccctgcagagagcccaccatgcttctgcttggtggggcctcctgggtggagctccggggtaagccacatctggcaccctatcttccagggctgtatcactagccttgtgcccagtggctgaagactcagatactgggcttgccaggggtggagaggccactattgtttggaacacgtggcctcaggccacagttcaggactttctcccttgtggctcaaaggaccacaggcgttagccagtgtctctgaggtcctcaggggtttctccctctgggcctagaccactcgcagcatctccctcaggatcatgtttgaaggtggcagaaaatcgcatcacgcactccgcacactggctgctcccggcaccatgaaggatgggtggggcactgcatggagcagccggggctgcgggcttgggcacggaggagggagggggctgtggacagggatgggggcctccaatgctctaatgattataggaggggtatgggagggaccggtggatttctttctttctttctttcttttttttttttttttagtagagatggggtttcaccatgttggccaggctggtctcgaactcctgacctcaagtgatccacccacctcagcctcccaaagtgctgggattacaggcatgagccaccacacctggccagattagtggagctggaagggggctgccctgggttcctcccagtggtgtgggaaggtcggagggtctcccttcccagactctgtatttcagccaagcagatctacctgattcggggagcagcaatgaagaagcccagccgttgggggaacctggtttagaggggcaggaactcagagtggaacaggatgagggggcacgggatgggcctggagataccgctgagcccctgttgggtgtctgacccatggctgaccagagagatgtaggttctgaggcctccacgttcctgtccacccggtgggatgacagctcagtggtccctgcaggtcctccgtgggccagagctccgggcaggtaggcgaggaagtgactgccccccaagtcggccttcccagagtctccaccacccgcccctcttccctgagccttcgctgggtagcttttatcacattaagatgtttggcctgatggggcttactcagcttcttggaggaacgaagaaagggccattgttccccgtggccgctgcggtgcatgctgacctatttctggaggcagcggcagaccactgaggtcacaggggcggcccacggaggtcgagtcgcagagtgagccacctcctgtggtgtgtggggaatgtgcagtctgatttggggagggggcagggagggcctgtcaggccaggacactggcaccagtcctcatgccttgaagcacattctggacccgactgtgtgactcaggccagtgctgcccttccgagccccagtttccccatctgccaggtggggccactgggctagggggcagcagagggctagtccaaccgtgacttcagcagaggggatgcaccctgcatatctgtgctgggccaaggaaacagtctgctcagggaacatgtccctcactgtggcaggcctctgcccagctcactggtctccctgaagcagcaccacctccaggaagctcttcctgaccagccaccctggcccctgcaatctggacatcgccccacggccacggtacctggatgatggctgggaagggatgcttttatttgatgcaggcattctcttgatcccgtctggcacatcagaggccatgggaagtgcttttggatctccctacgcactgccatctgccttggagaccccctaggcagccccatctttcctctgagacctgagccacccgggaccccaacaccccggggtgatcggctgcggcctgggtgaagcctactcgcctcaagcgcacgggtgtcctcacatcctcacggtaagcctgtgtcaggtacctctccgggatgctgactgtgactactgaggtctgggcagcaccccaaggaggtgagtggggacatccaggatgtgcctggaactgccacttggccggcacccgactccagcctaacccactttcctttggagacaggagatgagcggaagtgtgcggccctctccggctcgttcggctcagccagcccagccaagcaaacctcgcccagggccctgtctcctggctgaggcttctcatggtcaccggtgagttccacgttgccaaacgcaacagtcgagccctaggccacgttattgacgcatcagcaacatgtggcaagtggattgcttcctcctcactcggcctcctggcctcccctcggccttaccggcttctccttttcagaatcccttatcttgcttgacttccagacactgggtgcccagggctcagtcctggggcttcttctcttttctttctatgctttcttgatagatagatagacctcatctattaccttgacttctgctggcaactcctaaatttatatccctagcatagactgctctgctaaatgaaatctgtatatgcaacgaaccactcagccgcggacatcacagactttccgtgttcaaaacggaattcccgacttttacctccttgcccccagaatgctcctctcgatcttccctgatgaataaatggcaaaacgtcctcccaattgcttgggccacaaccttgagtcacccatggttcctctctttctcccccaggacctctattccatcacaaatccttcggctctcatcttccaaactcatccggaatggaacctcctctgacaccaccatggccaccgccctgccctgagccaccgtggtctcttgcccggggagacccaggtagcctcctgaccggccttcctcctcccacttcttcccccactgcctcttctccatagtgggccctgtaagccccatcccatcatccctctgctcaaagcccagggctcctgcttcacagagagcaaaaggcaatgcccttaacatagcttgcaatgccttgctcacactgaaccccaccccagatctcagctcatttccaagctgcaatccccgaccctggctctctccatcctccttcctggctggactgtctggtcttagcacttaacaatacacacattcagcttgttcatcttgttgcgggactcccacaccagaagatggattttgtctgtcttgacccccccatggtgtctctggcatgtaagccagtgcctgacaccgttcagtatgtagtggttgaataaatggatgagtgtgcccaggactgacaggtccccgaaattatagttggggcttcccttggggtcctggagcacaccgagggcatctgaccccagggcaggttgcctcagtttcctcacctgtaaatggaactgtagtggggaacagctaagcccctgcacagttgtatggctcctcagggccccggtgaggaggggctggggttctgcagaggtccacccctctgggaagcccagccacctgcagccctggagaccagggagggtcctggctgaggctgggtgagcagggattggttcctgaggagttgaggttcatgatgtcaactcctgagtcactgaacacacatctggcccacaaacccctgcaggagccggactctcaagtcaaagagagagcagaggaagggcctggtcagcagacccaggggggactcccactttggaggatctgggtgtgttccttgggttgtggatccggcaagggagctggccgaggttcctgggtcagtatgagaggccctgtgagtccagccgccgatggggaggcagacttccctggccgtctgtctgtttgtccacccatagtggagcaggagctcagtgaagcctagttggacaagctcccagcttggtccccaaccctcccccgtcagggctctgactctggccccaatttgcccagcatcagaacagtataaagggcactgggaccgggcatgatggctcccgcctgtaaccctaacactctgggaggctgaggtgggaggatcacttgagcctaggaatttgagatcagcctgggcaacatggcaaaacccagtctctacaaaaaatacaaaaattagccaggtgtggtggcgggcacctgtggttccaggtgtttggaaggctgaggtgggaggattgcttgagcctgggaggtcgaggctgcagtgagctatgatcatgccactgcactatagtttgtgctatggagcaagagtttgttttaataaaataaaatataaaataaaatataaaataaaataaaataaaataaataaaataaaataaaataaataaaataaaataaaataaaataaaataaaataggcactggactgggaacagagcccaaatctggttccaaatcctgagcctaccccttggagcagtatcatttcacttccaaccttagtttccactctgtaaaatgggtataaaaattcctaccttgcaaggtgggcatgagattcaaatgagataaaggaagaacatgttttcataaggcagtaagaggtgtttttctgaacagatattggatgtgatgatgtcctgcagagcccctgccccagccagttctatttcctccagcctggccgattcccttccatctgtgcttgcagtggccggcgggcactgccctaaacacactatacatgagtctcacgccagcccatagcccacccttccaggtcttcccattctcaaaagcctcaattcccagtctgagctggagcagagggtatacacgagggagagagtgacaggatctcctaggagggtcgctgtggaagttttggaaataacatgttcaataacaataacaaaccaaggtagattatgaagcaggacgttggctgggcagggtggctcacacctgtaatcccagcactttgggaggccaaggcaggcagatcacttgaggttaggagttcgagaccagcctggccaacatggtgaaactctgtctctactgaaaatacaaaaattagctggacatggtggtgtgtgcctgtaatcctagctacttgggaggctgacgcaggagaattacttgaaccccggaggtggaggttgcaatgagctgagattgtgccactgcactccagcctaggggacacagccagactctgtctcagaaaaaaaaaaaaaaaaaaagaaagaaaaagaaaggaaaggaaaggaagcaggacgtcaagttcttgacttttagagctaaaatatgacactttgcagacatttttgattctgaccaggctccccagggtattggtggagagagagtgagcccacctggggcagaaaggtggggtgggctggggaggggagacccttagtacatcaggtggggaaggcagtgcagaccccagctcagtcctcacctgcccagtccccacctcctatcaccttctggttgaggttgatctccttgttttttcctgcctcgtccagcctcctgcctgctgtaatcctcaaaggctccccgggccaggccaagatcaaggctccccaagaccaccactgagtgccccgggcttgggttctgtagctgaatccagcatccttggttagctaagtggcccttcaccctggctcagtgttcaaggtttggaggccaaggtagtggacctggcacagcaggaaggaactgaagggtaggggagctgtcagggcagacctgggctgcatgggaaacttacagagtctgtcctggaaaaggagggtgatagtggagttggccttctccactcccaccaccaccacctctaccatcaccaccaccaccaccaccaccaccaccaccaccaccaccaccaccagggcccctttctggggagaaaggagccaggcagcctccctgtggcctggggaggatgggatgtggggaggggatagagtaggaagacaggtcaaggatgctgggcttagctgaggagcccaggcagagctgtgtctttctgcacctgcctggcactgtagctggttctaggcatggtctcaatcctatgacccactcatggtgtgagcttccccttccctggaggacagttcctggagagggtgtgggccaagaaaaagctctaaccagcaccctggccaaatccctggaaccagcccttccttccagcagaccgtccatcaggcaggggcatcctaggccaagaagctcccagggccaggtcaggaccaggctctgggagacagcattctaaggggagggggtgagatggcggagtgacctggccaggggctgtgttcaggggcaactctggatgtgaagagctgctaatgtgggggtgggagaggacgaggtgaagaccctgggtctgccctactgagcccccaaactttctccatctccaggggtctgagggtgggaaggcagtgaagacacaagtggctctcactggcaggggaccgggaagactggctggcggtaaggtgagaacagtcgaggccccagtcactcaccccccaaaccacttctcctgtccctccctggaggggctcagaggcactctgtgtagacaaagaaacaagtcagtatccatgacttgggacagagagtggaaaaataccactgccattcccatgacctctgagctctctgcctgcccagaaacccctatgtgggggcaggacatggacccattctcaggtggggactttggagtccagggcctccagaccaggcgagtgtccagtgcccaccaggatcccagctcagggagcagctggccttctgcaggctgggtctgcccactgctgcccccaattgctggctaacccgccccctctcctgggtcctgctgccaaaccctgcagtcattgcctgctctgaacctccgtcccttctgcgcaggctgcgcttgctcactctgctcataggccctcctgctttccaagaataaagtcactgcactgcgtggcacctggaccctgcacacagtaggtactcagactgacccacagtacagaacttggggagctcagcctgccgcagcctgaccagcccctacactggtcaagttcctgcgctaatcgcaggactgcagtcatggccatttcacagatgaggaaactgagggtaactgccttgcaaaagccccgcagcaaaatcgagtcaggaggaagagtccagcggtggaggggacccaaaactcccccaggtgcaggcggccgggaggtgggaacacggagctttggcaccctgggccagcagcccctgacctccccgcggtcatagcgctctctgaggccagactgcaggttccccaggcagacccgtccgagcgcccggagaggggacgcccctcgttcggagcggctgcgcccctcattcggcctccgcccggcgcccgcccgcctgggtcccgctcaccgatgatgatggtgcaggcgctcagcagcccgatctccttcttgagcgccacccgctccgaggcgccggggacggtccctgggactggggagggcgagggcgcaggcctggggttcccgcgcccgctcggctgctgcgtgtggccggccatgtcgctgtcccgccgcgtccccgctccctgcgctgccccgtctgtccggccggccgcccgtcggtccgtcggtccgtgagctcacggccctcgcagccgggacagcgcccacaggcgggcgcatgcgctggctccgggcccgggactgggggccccgggcggcgggggcccgggaggggcggaaggagggccggcccacagccccctcccccacctcccttaaagggaacgccccctcccccagtcccggcctgggaaggaaggagaggacttggggcagatctaggaaggacttcccagttgggcgaaggaagggaccctccagttgcctgagttacatccattcttggggccgggttggggagcagagctccgagacaagacaatccctgctctcagggaggccgagggggacggcaagaataacagctggccgcgtgtggggatgcagtgtgtgctccctttagtactctatgcctgcacgatgtgtgtgtgtgtgtgtgtgtgtgtgtgtgtgtgtgtgtgtgtgtaggagacagctcccagggtgagtccattctacaggtggaagttgaagcccagagatcagtagcgatcgccgagcaagtgcagggctgagaccaaaccctttctcgtgcctcctgaggctcccaggcggacaacctcaggaggggtgggggttgaggtctggaactcctctgaggggtctgggtgtcctatgcaccctggatcaaaggcctgagggtcgaggtgaagatcccgggggctctcatcctcatcacggggacccaagacctgtgacgagtcctggacacggctcgcccaccctaccaggctctgggccacctctggcctgagatcttcactacaggctcctcgtcccaggtcagagtgagggctcagcggactagaactcgggtctctggtgcaggtcccgcgcgatccagcccggctcaagaaggccaggcgacctggaatgcccgggagacacggagaaggaggctgtggtcgcgggagagggtcgggagtgcggggatccgagggaggctgcctcctcccggaagccgtccggactgtgcagccgaggccggcggaaaagatccaggggggccgcgtcggggccaccggggcggcgggcggggcgagcctggcactgtgcggccggcggcggaacagcctttgtttcttcctggcggccgccgcgacgcgccgtcccctgcatgtggatgaggcctcgccgggcgccccgtccttccccccagtggcggcctccgggtttgctggggccctgccaggggtccgacggctgcagggtggaccggggtgggacggggcgggggcgggtccctggcaggggcgggtccctggcagcggcagggcctggaggtgggagcggggcggggccggcgtttgcaggcacacaggagcttcgaagttgggggcggggacttggggtaggagtaggagcgggaggatccagggtggacgtgctggtgggacgccgagggggaggccacccggcgaagctgcatccctctcgcttctgtcgtcggagaccggcattcttggcgccctccacctccagccccagagaccattcagaggccgactctcttaaaggagcctcgcgcagggtaggggcagccctggctccggagacccctgattgtcgcgggtgttaggggccagaggcctcgaccttctggtttgactctccccagccccccagttgccctcgcaattctagggtctgctgggagagggtctagccagggctggtgcaatcaggggcagcttgccaaggggcaggggctggcgcaagcctcgcagctctgaagcctgtggttttcgagggtgtctctctgggacctggaatgtggagtatgcgtttgtgggggaaaggtcggcctagggctttgcacaggatggagtttgtatgttgtcagccaggccccatagctcaggaggtccttttcgtggaattgaactagaacctgcaaatttcaatgggaacaaaaggttagtaggattggtttaccatccaaaaaccaatcagcatgattctccacattaatagagagaaaaaaggaaaacctcaacagatgcaaaaaacagtcatccgtgatgtaaacaaacaactcttagcaaatagaaacagaagagaacctccttaatctgataaaagtatctacctaaaaacaaatctccaagaaaccaagaaacaaacaaaaaccctacagctgacatcatgtttagtggtgaaagtgtgaatgcttttctactgagattgaaaatgagaagggatgttggcacttgtcaatattctatacaatagtgtactggaggtcctagccagagcaataagacaagaaaaataagtaaaaaggtatgaagatagtaaagggaaagataaagctgccattcacatatgatgtgattcagtatgtagaaaaaaaattacaggttaatttaaggaagataagttcatttagcaaagtcgctagacagaagtttaatatacagaaactaattgtattctatatactagaaataattagaaaatgaaattaataatagcataaaatcaaatacctaaaaataattctagtgaatgatgtgtacaatttttatgcaagaaactacaaaacatttctgagagaaattgttaaagacataagctaatggagggatataccatgttcatggattggaatttaaaatgttggtctccacattgatttatagaattgataaatacatccaatgtaattttgatcaaagcaccagacaactttgttgttgattacaaggcttttttggagggatgaaactcaacaagctgattctaaagagtatgtgaagaagaacaaatctggaggacttatactacagtaaggaagacagtgtggcattgatgcaaagataaacaaatctactggtggaagaaaacagaaatccagaaacagacccatcctggtttattatgacaaagttgatattgcagaacagtggagaaaggacgggcttttcaataagtggtggtggatctatatattgaagaaaaaaaccaaaacccttttaatgtcacccttccattataccctaaaaccagtcccaggtgatgtacatgtgaaatgtacgtgtgaaaggtgaaacatcaaagctgctagaagaaaactcaggggagagaatagatacattttcttaaacagacataagaaacacagtaagaaagtgacagattggactacattaagattagaaacttctgtcagtcaaaagacatgattaaagaggaaagagtaagccacatatgagagaagttatttccatacatatggccgataaaggacttctatctaaaaatataagcatatgagttgtattgaaaaatatgtatcaaatcaataggaaaaagttttaaaataggccgggcatggtggttcatgcctgtaaccccagcacttgggaagggcaaggcaggtgaatcacttgaggtcaggagttcgagaccagcctggccaacatggtgaaaccctgtctctactaaaaatgcagagattggccgggggtggtggtgagtgcctgtggtcccagctagtcaggaggccgaggcaggagaatcgcttgaacctgcgaggcggaggttgaagtgagctgagatcatgccactgcactctagcctgggcaacagagcgagactccatctcaaaaaaaaaaaaaaaaaaaaaaaaaacaaaggactttaaataggtgcttcccaaaagaggatgtccaatgactgttaaactcctgaacaggcactcaaacctcatgggccatcagggaaatgcaaattaaaacgagaataagataccactgagtagccaccaaaatggtgaaaattacacacccaatgttggcaaggatgtggagttggtaccaccagtttggaaaaccatttggcagtacctccaaatccagcatctccactctgtattagatgcctcttggatatcacgccacctccccagcccctagcctcaccttggtgtcaaggctttgccacctttcctcccacttcaggtgcaggtacaacctgccagcaccccccatcaccctcagggattctctgatgcccctgaggaatgagataataagggaccaatctggcacccacaaacttgcaatcagaaatgcaggagagttagcacactcgggcctatccttgtgttactgaatggtgccacacagttccaggatctgggcgacttgaacaaagaattggaagagacatatacagatagcaaaaagtgtattaagtgcagtattccactcttggagaggaagagtggactgatctttgtgagatgagatcggcattagtttggtgtactttgggtctttctatatgttgtttttttccccctcttcccaaggctgcctaatctctagccagtgtctatctttttgattgacaggtgtgttgcttagttactttggcccccgtgcgcttgcaccttgcctccatcccataatcctaagtacatacatgatatgcagctcatatgcatgaaccttaagtagctgattatcataacggggttatgttaaggataccttttctctccaatgcacatgcccatctctgaagcgcagccccttactggtttggtcaggatcctgccggccatgggatactgctcgcttttttttttttttttgagacggagtctcactcttgtcatccaggctggagtgcggtagcgcaatctcggtggctcactgcaacctctgcctcccggttcaagcaattttcctgcctcagcctcctgagtagctggtaattagaggcgcccaccaccacgcccggctaatttttgtatttttagtagacagtgggtttcaccatgttggccaggctggtcttgaacccctgacctcaggtaatcctcccgcttcagcctcccaaagtgctgggattacaggcatgagccacggcacccggccctgctcacttttttatcttacttttgttttggctgctgaacctctgctttttgtctggcttcttgctcacctgccccttcaccttgcttcttctgctctctgcttttacttattctgccctttatccaactttcaattccctttgctactttcctgcctcattttccctgttctcctatctcacttggacaatggcagatggataaatggcagatgggagtcagtggataaattcttccctctacctcatcccagatggacccttatgaatcatattccttataaaaacctcttggaagatgttactacaagattcagcatcagctgcctttggcaccaagtggtggccaactctgaaactcaccctcatattggctctcatgccatccctgttcacttcctttcccccttactcttgcttccctgcaattgcatcccccagttaagttctacctaaggccaggcaccctggctcatgcctgtaatcccagtaccttgggaggttgatgggggagaatcgtttgaggccaggagtttgagaccagcctggggaacatagtgagaccccatctctgcaaagaatttaaaaattagctgggcgtggtagtgcatgcttgtagtcccagctgctcaggaggctgaggtaggaggatcctttgagcccagaagtttgaggctgcagtgatgagctatgatggtaccactgtagtccagcctggatgacagagccagatcctatctctaaaaacacaaaacgaaacagaagtaccttctaagcttttgccccaggcactgctttctggagaggacgaactaagatacacccctaggtatgtctccaacagaaataaatatataaatgtactaaaaggcatttacgatatcattcatagcagtcttcctagtagccccaaactggaaacaacccagatagccattaacagtagaatggatgaacatgtttagagtacatgtaaattccggagttctgtgctacaaaggaaatgaacaaattactactatgttgcaacatggtgaatctcataaacaatgttgagcaacagaagctggacacaagattacattttgggatgattccattaattttttttaagagacggagactctgtcgcccaggctggagtgcaatggcaccatcgtagttcactgcagcctccaacatctgggctcaagtgatcctcccatctcagcctcctgagcagctacagctacaggcatgcacccccacgcctgactaatttttaaaatttttttgtagagacagggtctggctctgttgcccaggctggtcttgaattcttgggctcaagagatccagttctgggatgattgcatttatagttctagaataggcaaaatgaatgctgatgttagaagtcaagatagaggtttatccttaccttcttgggggtaggaactgggcagcaatttggggataggaactgaggaggggccctggagtgcagatcatgtctgacttattgatcggggtgctggtttcacgagtatgttcagtttatgaaaattcattaaggggaacactagatgattggtgcatgtttgtgtgtgtaggttacactctgacaaacatgggacattacacatggcctgggcagggtcctgggagggtcaggatctgcatgctgggagggggtctgcggcctgctctgactccctcgtgggtgttaaactcactcagcactcctacgccacttccattctctttgacactcccacgtccagcccaggtatctcctcaggcagccccagtctttccttggtttctaccatcctgaccccaaaccactccctctccaagctgcaagcacctgctagtttatggcctcctttctgcttctgtctcatggattctcagccctggacattgtttctgtcgtgcttgcctccttctctctccccaccttctctggccttgccctgcatttcctgcctcctctctgcaccctccctggacctccccaacaacaaccatgttcaacccttgcactggtgggccaagggcgcaaacacacatgcaagcccctcacccgggaggcctacatatttccaagttagagatgaaactgcacccacgatgcagccctcattcacacccggccctgcagcccgcccctggggcgtggtctcccctggttctcatggccgtcatccactggggtgggagctaagacagtgcccgagaaccctgggtgtgagcacgctcctgactgggggctggcctgggcaccctttcgccacctcgcttttccaacctggcatttccagggcattctaatctcctccccaaaatctcaccaaggagcaggacagggaaggagcgcagacaggtaccaggacaccaggctgcccagacacacacacacacaaccacacacaactacgtacaaccacacacaaccacacactcacacacatgcacagccatacacttacacacccacatgcatgaccacatacacactctcacacactcacatgcacccaaccacacactcatatctcacacactgtcttacacgaacaaccacacactcgctctcacatgcacacaaccacacactatcacacacacgtgcaaccgcatactctcacacactcacacgtacacaaccacacacacatgcacaaccacacattctcactgacatgcacacacccacacactcatacctcacacactctcacacgctgacatgcacaaccacacatacataatcacagacacagtctcacacactcacatgcacacaattacatacaaccacacacacaaccacacactcacacacctgcacaaccacattcactcacatacccagatgcatgaccacatatacactcactgtcacacacatgcacacaaccacacactacatacaaccacatacaaccccacacactcctaaacactcatgctcacaaccacacactcaaccacacacacaaccatatgcactcaaccacacagaaccacctacacggccactcatattcactctcacacagtgacatacacacaaccacacacaactacacactcacaaccacacacacaactgcatactcacacactctcacacactcatacacacaaccacacacacaaccgcacattcacaactacacacaaccatacagaacctctcacaccaccacacatttgcaatcacacacaaccactcacacactcatccacacacgcactcaacactcagccccacatctttgggcctgtggggtctttttttcgcatctgtcctctccgacaactcactgttgttcagttatcaacctttaaaacactcttacgagactgaaattaaaaaaaaaattctttgcatttgctgctggtgacgtcctggctctccagggcacggggtccacagcagagacccccttgcccaggtctaaggttggcctggcctgcatagctggtggggcttctagaatgaccacagggtgttgttccctgtaattttcaggctgtgacatcccacccagccccaacccatccctcctgtgagtggggtcgggatcccagttgccacgcccagagctccgaccaccccacctgggcctttcaccacctccccactcccccgtgcactgcacccccaccctgtcctgggggctgaaacagctcctccccaacccagggctgctgctccgaggtacaaatggaaccctccctgtctcggatcctcttctttcagcgcagccacaggctgtgaatgaccccacaggcaggtgtcaggagggagatcatttaattcatggtccaaactgagacaggtttgcaagtgaaaggaggcactatttataatcacagcagagtacaactgacagatataaaccaggacgtcccagcaaactggatggatggtcactctctttcaagccaataactccgactctgtgtgcccaaatacagcaggcattggtcacaccttgcctgctcctgctgcctccttggccgtaacttgtcacaccttgcctgctcctgctgcctccttggccgtaccttgtcacaccttcatgcttgtccctcatgagtcaggccaggcatcaccttggccaggaagcctcctggtccccagaatggaagacgtgcccattctgtgtccacattgccacctccccaggctcaaaggcagagacctggccttgcccccagcacatcacaggttctccatggaggttccaagtgtctgcctcacgagctgcgagatgcaggttctggtcccggctctgccattgacttacagactggacatggagcgtctcagtttttccctgtgaggtggagaggaaaagggcagcatgtgatccctcgctgcccacagctgttggacgggcagtttgcctgaactcgcctttcttgctccccaggtcctggggtcctaaaaggggcatggaggagggggtgacctgtcagggaggccaggtttcttgtatcttcctattatcccatgtcctcccctgaagccactgcattcacggccctgtgcagcccagtagggaacacgagaaggtagggcttggacttctgatctggaaccgggatctcctctccttccaggggttcccagccctgcatcctgtggggccagcctccgggaccagggtaccctctccgtgggacctttacccatatccttccatttaaggacacccgccattccaaaacgtgccaccagagggcagcctccgcgttggtccttgagaccaggtgcctgagctggacctagtggcctgactctcccgatgtcagagtccgggcctctgctggatcttgtattagagggctggggagaacaggctaggattcctgggcttctccggggaccactagagtcagctgggagccagggaagtccttcctgagagcggctcaggctcttttctgctgtagcccgagagaagagatgcaggggaggccccagggactgtgggtgctggcctgggtcaggacattcatagtgaaaccagagagatcttgcagtgagattcatttcgtgcagcgcacctgcctcggggcagggctgggaggcacggggaggcgatagagcccatgtggtggcggtggctgcgggagggaccggcgcttatctgatgggcctggcctttctcacagctcggtggagccgccctgccaggcccatcttggccggtgggtcggggctccgcaggccccgtgggctcagcctccccacctgcctggtgggcagggaggccttgagcctgggaaaggcgcgggcggccactgctggaggggagcgggcaccgtggggctgcgcgctgcggcgggctccccccacaggctccaagacacgtcaaaaccgggtacaaaaaattggggcaatctacgtgtttacttctaacaaatgaatgcttgtaacgtaaaaacaagactttgcacaccaccggggctgttcggatccgagaacgcatgggttcacgggaccctgtgggtggaggcccagctggatgtggcccctgggtggcggcatcctcagctctgccggtggctgggggactgtgcgtggaaggtcggtgagggaccccagaaaaaagtctaacagccaaaggcggaggttgcagtgagctgagattgtaccactgcactgtagccctgacgacagagggagactccatctcaaaagaaaaacaacatttttggttttgtttttttttttgctcattagctatcgttagtgttagtgtattttatgtgtggcccaagacaattcttcttccaatgtggtccagggaagccagaagattaggcccccttggtctaaggcaaagcagtctcagggtcagaagacctccaccccagctcgggcctgggtgaccctccctgcagagtgcctctctgagagcagggtaccagccacttgcaggggactgagctatctgctggaggagggttcaaaactggcccccagtcctgtgcttatgtgagtcaccagtgggctacccagcgccaccactcaggccctgcagacggatgtctgtggaagcactttcacagcgacatgtcacagggatggagaactgtggatgaggactctccaggctgaccagccggctctgccctgaccatgggttgggaccccaatcaacctagctggggctgggccctgccagaaggggcgcactagcctggcctgaccatgggatggaaatgggacattgtctgggggagaggggagtggggccagccctatgttatctccccttttcaaagaaggaaaaacccggcacagagagagggaatcatcggcccaaggcctcacatctggtaagcggggagctggagtaaccagaccctgaatcctgggggtctggtaaccgtgatcctgggaggcttggccacgtggtcctggggcttcctggccccctcctggcctgaggcactcatcccagccccgttgatttgatgggcagagacccagacctgccaatggctgggtgtggccagcctcgtgaactgagcggggcccggtggcttctgcccagagctgcctttgatctcaaaagtaggctacccccataggtgagacccgatgtgggcgctgctgtgctaaccccatgccccaggaccactgaaacctctcttgagcctccctggaccaaactacctggttgctctcagtcccttccacagcccctcgtcctccacctgcccctgcagtgccctggggctccctccagcgctcccatctcctcactttttggtttttttttttgagatagagtctcactgtcttgcccaggcgggagtgcagtggtgggattttggctcactgcaacctccgcctcccgggttcaagcgattctcctgcctcagcctcctgagtagctgggattacaggcatgcagaaccacgcctggctaatttttgtatttttagtacagatggggtttcaccatgttggccaggctggtctcgaactactgacctcaaatgatcctccccgcctcggcctcccaaagtgctgggattataggcatgagccactgtgcctggcctccctcactcttgacactttatgggcctgccatcttcactccttgctgcccacacccagatgttcctcctggcctcagacctttgcacccggcctcgctcaagctgagggtccagacattgatcttccttcactcccaggtctcacctcccttcccttagccatgggacatcctccttctgcagacaagaaccctggggtggtcctccctatcccctgccccccgtgagcatctaaacctggttcatctaaccagactccttctcctgctgtaaagaatcttattgtatctccttaccaccccaaagtaaaattcatagatcatagaatcccagccagactttcaaaatccatctaatgtcgtagctttaaaataaggaagaaataggccaggcacagtggctcatgctgtagtcccagcactttgggaggctgaggaggatcacacgaggccaggagttcaaggctgcggtgagccacgactgcgccactgcactccagctggggtgacagagcaagaccctgtctctaaaaacaataaataaataaaataaggaagaaataaaaggaaagtaatttataatttcattatgtatattcaactggaaagaggcctgggtgtgacctacagtggactcagatgtgggttgcacagaatggcagaggctgtcactgctgcagacacagacgggagcagggttaccctcagggctcaggtgcctgctggggccaccctgtgatcttggggatgtgtttctccaaaatggcaaatgcttcttggtaaatttccaaacaaaacaaagctccatctcccctcagctttcatgctcattgcatccctagaaattgtgcatctggaaaagacgccgaacagaagtagtcattcccgatagggtcattaccgatagggtttattagcaatcctacatcagagttcctcatgccccgcgctgtggatatgttgagcagaataactgctgtgcagtggggtatgctcggcagcagccctggcctctaccctctaaatgccagcagtacccctaggtcatgacaatcagaagtggctccagacactgagaaatgtcccctgaggggcaaaattgttcccagttggcgccccatccccacctcctgcccacacagaactccctcctctcttgtgtggggtgcggggcaacttgccaccaggcgggatgcccctcacacagcaggtccctgccaccccatgactacagcaccccattactgcagccagtgaaccccctcacacttctaaactaccccaggggagaagcaaaaccactgttgtgggcctctgacctccctgattctctaatctgggtgggtgtgggggcagtgatgccaagaagctccttcccttcccagcacacactgcaagatctgcggtcctcatttctcccaggcctggctactctgtaacagctgcatccttactggccctgtggggacatgggacgtgtccctgccgtggctcccagcggccccggtgtgctgggcctttctgcctcccttaattccaccttccctgttccagctgcttggaatgtcctcagtgcttttcctctgcagttaccctggaattccaggggagtgcttgggttggtggaaccttcttagcccaggtatcctcctcctccagggagccctccggaaatgtccctcccttgataggctggggccagcactccctccccggcttctttagcccatgggaggcagcatccactcattgtgttcctccttccctgcctcctgctcccccataccatcccttaacccagccagagtcattcctctttgtagcatcccagtcctggcccagagtctggctcctaaaaggcactataaatattggtggcaaagttgaggctgtgacactcagttcaattttttttttttttttttaaagagacaaggtcttacttactctgtcacccaggctggagtgcagtggtgcagtcatagctcactgcagcctcaaacctctgggctctagcaatcttccggctcagcatcctgagtagctggggttacaggtgtgaaccaccgtgcctagctaattaaaaagaaaaaaagtttttttgtagagacagggtctcaccatgttgcccaggctggtcttgaacttctggcctcaagcaactgtcccgcctcagcctcccaaagtgttgggattacgagtgtgaacttcaattcaattcaattggcccttcaattctgtgttcattcactgaagattccaatgcccctcccccatctaaagtggggcagaccagagggaggagcagtggaggcggggtggacagggtcccagcgctggaggagacccatctgtgagccacctggaatctcatctgcctgcccaaggcttctgccccttctacaggaatgggagtcccttcaggtggacataggagtttctccatctgaaagtgcccaccagggaagaactgcgccaatcccgatgggcactggggctgagggagggcactggggatgcaaggaccctctaactccacccatagaacccttttaggggcccaggcctccaggccagctccctggcacacaccacttgtggagtatgaacttccagcccctaagcctccgggctttgagcacagcctgggcagcagctgcaggcacactggggtgcccactcactcttcatcctgcccatgcctgcccatctctagccaaggtccataccatgcacacaggtgagtgctgtggggaagagcacacagaggctgcagctggccccccgggcaggtcctcagcccactaggcccctagcccaaccctggctgagaccccagcctgccctgtgggtgcccggcttctgtgacacctccgttgcataagcggggactagaggtcaggtgaaggctgcaggggagggggctctctagtggatgaggccacctcccagctggcagggctgagtgcatggcagtgagggacgcctgggtcctgggaaggcacaggaggtagagaccccgaggccctgccagcttccccgcgcaagcctgggaagcaaagtgcccacatcttctgtttctgtcagttcctgccaagtcccagtgcctacaactgggaaatggggcaagtcaccttctccttcctctcttggtggctctggaaggaaaaagccagtggtgtcacctgaaggcagcccctttaggcaggctgggtctggggtctcagatgcctggtgctgcccggtgctgctggccacgtgtgcccccgtgccttggttggcagggttctgggcagccccgcctacaggcctttccccccgttcttcgggctcccctgtgtgatgcaggcggcctggccctggcccggaagggaggccgctcttggctgatgctcacatgcccactcctgggcctggcctggctcctgggccctctcccatgcccatgtcctcgagggccaccaggagacgggccctggttggggcagacgtcgccttggggctggtccctcctgggcttctggctgggttggtgacctccttccccactgggttctggctgggtgttcacctggggctcctggctctgtcccaggttggctttcacagcagcaaccgtgaggcctggctgggaggaggtgggtggaaagtccaaggctcctcctctaggcctccctccccggggggactagctgatcacggggggtgctcctgggcaggcactcctgggggtgaggggtggttggggggtgcatgtggtccggtagggcactggagaagaccctctgcccagagggccccaggacaccccttcccataggcccacacggctctgtggccgtgtgcgtgggagggagggagggatgagtgtcacagcgggtgtgagtgcgcctgtgggtgaggcccggagagccggcacgggggcgggggaccgtgagaaccagtctgtgggtggagacctagggcaggggtgcccttcctttctgggatgtcccaggccaaggagtttgggggcttgggggcccacagtgcaagaggaaatcctggccactaggtgtcacccggagcccatgggacagaagcaggtcccccccaccgcccccggggaggggtcggagccccttacctcccaggtatgcccactcccgcagctggggggaatccctggtctgtcacggtgtctgagggtccactcgcagtggggagctggtggcacggcgttgccctgtgcaggaggccatatgctctatggaagcaccccgtccccacctcctgcccatacagacccagactgaggacggagccagtgacaggtggggatgcagcatccctcccagcccacccagcccctctgatgcccgggtgcctgcggcaggggccccctcgtgccagcccctccaagggagcagcttggacctatgcctgccgtgcttgccggcctcaggatggaggagggaagggtcctcgttcacaaccaccccccatcccccttaggtccagctcagcaaattagggtcccaaagccctgcccagaccactgggggccttttgcagcctttcagagctggtccccaccctcctgctgtgcatccactcatccaaagcacagcaaggacctactgtgtgctgggagggccctgcccggcggagctcacgtgtgatgggatgtcagccgccaaatatagaaaccagaaaatttgtttttattcatttatttatgagacagagtcttgctctgttgcccaggctggagtgcggtggcactatctgggctcactgcaacctccgcctcctgggttcaagtgattctcctgcctcagcctcttgagtagctgggactacaggcatgtgccaccatgacctgctaatttttgtagttttagtagagacagggtttcaccatgttggtcaggctggtctcaaactctgacctcaagtgatccatctgcctcagcctcccaatacaggcatgagccaccgtgcccggctaacacttatattttttgtacagggtttcaccatactggccaggatggtctcgaactccagacctcaggtgatcgcccgccttggcctcccaaagtgctgggattacaggtgtgagccactgtgcctggcctaaaccagagaatttgtaatggagacagtgacacacaggaaaacatcatggaggaactggaagggccgtgggtgaggtggcagctttggtggggcttgggggaggggagcacccccagggagggacttgtgagaaagtgaggaagagcatcagtgaggtgagcaccccagggaaaggcattagggcagctggaacagtccgtgctaaggccccaaggcaggaacgagccaaacctgtcagtgaaacaccaggacctgtgtggactggggcggtgatgcaggtgggaggtgggaggaaacagagggtcttggaccgtgttgccttctccccaggccctcagggaccatccctgccacagtggagccttttggctggcacatgaggctgtcctagccgaggctggtcctggctggtgaggagaagatgccatggctcagggggtcaaacgggatccaaccctcacatccctgtaggctgaggagcagatacaatcccaagagaggctgggtaaggtagctctcgcctgtaatcccagcacctggggaagccagtgtgggaggatttcttgagtccagcctgggcaacgtagcacgaccctgtctcaacaggtggaaagaaaaacaagaaaacccccccaaatacttagccaggcatggtggtgtgtgcctgtagtcccagttactcaggaggctgaggtgggaggatcgcttgagcccaggagtttgaggctgcagtgagctgtgatcataccactgcacgctagtgacagagtgagaccctgcttaaaaaaaaaaatcatggaggggccctttcctcactggctgagcggtccccaaggcagggcatggctggtctgtcccagctgccaggctcctagacagggtcttcttggctggggggcaaggttggctgaggtagggcagagggaagggcggcagaggtcctgtcccagcacccctctgctgctcagctctttgcagtatctgcacaccccagagtaaaaccaaagaccttgccacagcagtgaccctacacgcagccccagaagctcgttcacctcatcaactctccctgtcacccagctggcaccaccacactactccttaagtagggacgctcctgccccagggcttttgtgctggtggcacctctgcctggaatgccctttccccaaaaccctcagagctcctcaccccttcaccccactgcaggactctgccaaatgccaccttcccaggaagctttctctgcccgttccattgaaaagcacattccccacctcagcactttctttcctttccttttcttttcttttttcctccctccctctttctttctctctctttctttctctttctttctttctttctttctttctttctttctttctttctttctttctttctttctttctttctttctttctttcctctctttcttttctttctttctttctctctccttccttccttccctccttctctttctttcttttctctgtttctctctttctgtctttctctctttctttcttttttattttttagagaaagtctcactctctcatccaggctggagtgcagtggtgccatcagagctcactgcagtctcaaactcctgggctcaagcaatcttcccgcctcagcctcctgagtagctaggatcacaggtgagcaccaccatggctgactaacatttcttaagatttttttttcttttttgtagagacagggtctcactatgttgcccaggctggactcggactcctggcctcaaaggatcctcccaccttggcctccaatagtgctgggattacaggtgtgagtcactgcgcccggccaaccaccttggtattttctatcctctttgccctgcttctcccctgaccaccatgtgaacttctagatcttttacttgtttatttttatggcccatctctcccactacccacactaggctgcaagctgaatggtctgttttgtttaccaaggcatccacaccacctagcacagtgcccgcaaacacagcaacaaatacttgaatgaatgaatgggattgaataggacaaggctcccccatccttcctgacctcatctggccacagtaggaccaggatttgggccttagcatccacccatctccagcagaggccaaggcctaagcaaggtgtcgtgtgcctcaagacggccgagccactgaccacagcacatctgctcctgcttgatggtcctgggaactgcgttttacctgcagcaaatcacattcagtcacctcaggcaaacactgcaaggcgtgaaacgtgggcaatgtgctgtgccacacatgttacatggaggcactggggacatgtaggaggatgaaggaaactgcatcgcagggaagaggtgatgccttggggagagacaggcctcaactgtcctgcctcccctgggggaggtgtcagtggactactgagtgaagatgtcctgctatcagggtcccctcgtgccaagtttctagtggcaaggcagggcctcccctgggagcctctcacatacctgccccttcactagagggcatgaaatctactccagcccaaggctgcgcagctctgagatggaccctgtctctctgaattgcctcttctgattctcaagaggtatttaaagcggatctctacttgctttttacttatttttgagaaaagttctcactctgtcacccaggctagagggcagtggcatgatcacagctggctgcagcctcgaactcctgggctcaagctatcctcctgcctcagcctcccaaagtgctgggattacaggtgtaagccaccaggaccagcctcctcttgcttttggcttatccagtttccctaaattaattttgtgtgccttttaggagaagatggggtcagtaatgcattagagcccaattaatcattctaaaaaaagatctgattgagacatacttataaagcgactcctagagctgaaaggtcaaaatctagcctagatattgaaaaacatttttagagaaatgtattcgaaaagctcaatgctctttttaaggtgagaggtggggagcctcaaattttgggagcccttgaagggacctgaaggaaccccagggatttcttggagcataatttgaaaaccacagattaaactcaagatatcctcattgcagggaggaaccacattctgaggcctatttttatgacaatggctagtagagccagtctgcagtacctgatgtccccagtaggggtcacttctaggaggaagcctctgccaggccctggtgtaatcaaggagggctccaggcccaagtgggcccatgtgcctgtgtctgtgcctcagtgccagtgacttcaagcttgagtctgctctgagccaggcgccactacatgcccccccagtggacagagctgccctctggccacgccgccagctggctagggctgatcagaagccttcagtttcaggacagctgccagggtgtggaccatggggactggtaagagtttctggctaagtcctggccaagccattccaagggacagctgcagtgtctctccagtcagcacctggaagggggccagcccagcctcagacctggggccaaacacatgtgagtatgtgcaaacgtgcacacacgtgtccacaggcacacacaaatacacatgtgcatgaacacatgttcacacatgtactccatgcacaaaggaacacacacacaaataacatgcacatgcaagcacatgcactaacaagcgcatgaatgcacacacgtgcaaatgcacagggatgtgtgcacaaatcacatatgtgcacacactcacacagacaaacactccccactctgcctccccaggcaggctccaggaatggagaaacgcctttgcatccaatgtgtttggggtgagatcagctgggggaggggcctcttccctgcctccccagtcctggcagctcctcccttctgggccaggcttctcccctgtctggactggttggcatatgtgtatgggaggaggaaggggcagcaggaatgtcctaccacccccaggagctgctctgggcagaggcaggggatggcgcctttgctggactccctggctgcatctttctgggtggggggcactgggatggttcctgtatcccatagaagcaaactgggcagagggccgaggtgggtgctgtggtcactgtcaggcattgaagggacccggggtcatccctgaagcaggtcagcctgggagaggccttccaggcttgctgcagtcggcacccccccccacaggaagccagcccagccatagcctcctgcccttttgaagatgctccctcctggcttctgtccctgctggcaggctggggtttctgaacccctcattcctcagtcatctcgaccctgtgagagcctcagaggcctcctgatccctgttgtcccctggccatcctggagtgtcagcccggggctggccctgagctcattttcagcatgacaactggtcctcagctgacacccccatcccctcagcccaggaggccagctgtggtgggttctgctgaatccagcttgctaaccaccagcccatgcccacagtccctggcaggggacacagttctgccccctcccccaccagatcaatacctccaagactgctgtcagcaaatctttgacctctgacctggccacacacagtgacccctgaacctgttggtctttccaccaacccttgctctagtctctggggtgggtgaggggctgacaccctggctctggcctgggctgttaggggcagggagagggtgaggccatcagtccccaccagcccggcctcttcccttcactccacactcagggccacagtggttggtgttgttgggggggggatggatgcagtgggggatgtgccacctatgccaagcaggctgtgatgaaggattcggggattccttctggagcccaggggccctgggagctccagccatgagtgaagagccagcagcgaagaggatggcttcccatcctctctccaaggcccacaaaggtgcccacccctttctgctctgggccctccggatcgatctgggacccagcagccttgcagccctgacctgagaatgcaaaggggcctgtacagattgcttcctgagccctgttccttgcagctcagctgggagggtccctgtcctgcccacccatcctgccccagataagggtctagcccactgtctcgcagaaaccgtggtggaccccagtggtgctgttgggagccccacatcccgaaccaccctgggatacagcctcgggagtcctgcgctccctggcagacaccactgaccagggaccctgccttcaggaaatccggccaggacaacaggacctgcccctctggtgtccaggtcagctcaccatgtggccctttcctggcccgccttcccttgctcctgctcctaggaagagatgcctccacctccactcccccatggggcattctgaaggccatgggttccagcagtcctgtgctggcaccaactgggtctgcggtaggacaaggggcagtggctcagagactccagcagtgagacacttccctgtcccaggaggaggggaagaagaggagcaggaggaggaaggagagggagaggagggaggatggtcagggccccccactaaaatgggacaggcaggtgaggggtgcttggagtggagactatgctggaaactgaggctgagagaaggtagtcagaggcagagccacgcatgtgtgctccagtgcgcctgactccagggtcctcgcttctcctgactgcatcagactcgaccttgacctctgggtatgctgggtcagggcagagtgctgacgcactgcagagcccctcgggccccgcctctctgcttacgggggccttctcaggagccaggagggaccaacccaggtaggggactgtttggacgagtccaggccaggtggaggtgtgggcagccggccctgaggtcactgggtgtgtgtcaggggtggggattgtccaggaggcccctacagagcaacacgtcattctaaggctacatttcacactggcctcgggtatgaccttggccgtcccttctcccctaagcagtcctctgggctttctgggagccttggtttcttctccacttgagacctgggccagtcaggtgggaaaagccagcagccacggggggcctggtgcagaggaggaggtgggagaagcagcaggcggggggcgcccaaggagcctctctgcctaccttgggctcagccttgcacttgatgaccccacccgggcctgtgtgacaaccatgccactgacggggaactgagcctcggagaggggaggtgactcacagaggtgacccaggagatggaaccgcattgggagctggggctggacattccagccgctgccaggaaaatcctgccggaagagtgcactgtgcgggtgcccaggaggctgcgggtctgcacccagctcctccgacccggtgcccaggacccctgcctggctggccagagaggggaagtgcgccccgggcggccagcccgcagctgttgggcaacatctggagggaaggaggaggtgaggagcagagggcgtggagctgggtcctgacgtgtgcccgcgctgcccggcacccacgagggctggggcccggtgccacccgggggtctcagcctccttctagtcccacgagccctagaggacttcctagtccccctcgctgtgccctggggggtctgggctctgtcctagggggtctgggctgtgcacaacacaccacacccccgccccagatgggggctcctgaagacccatgctccaacacacaggcacacacagacacgcacagatacacacagatacacaccacacacagacacacagatacacacctcacacacacatcacacacacacacagatacacaccacatgcacacaccacacacagacacacagatacacacctcacacacacaccacacacacacatagatacacaccacacgcacacaccacacacagacacacagatacacacctcacacacacatctcacacacacacagatacacaccacatgcacacaccacacacagacacacagatacacacctcacacatacaccacacacacacacatagatacacaccacacgcacacaccacacacagagacacagatacacacctcacacatatatcacacagacacacagatgcacaacacacacaccaaacaccacacaaaccacacaaatacacaccacacacacaccagacatagacacacagatatgtacctcacacacatatcacacagacacacagatacataacacacaccacacacacacagatacacaccacatacataccacacacagacacacaacacacacagacatagacacacacagacatagacacacacaccacacacacagaggcacacacagacatgcatagacagatacacatagacacacatgcatacatcacacaccacacacacagatacacagatacacaccacatacataccatacacagacacagacacacatgcatacatcacacaccacacacacagatacacagatacacaccacatacataccatacacagacgcagacacacacaccacacacacagacacagatacacacaccacacataccacacacagaggcacacacagacagatgtagacagatacacatagacatagacacacacagacacacagatacacatcagacacacacacagcatacagacaccaaacacacaaacacaccacacatacacacaacacacacatataaacacacactacactcatagacacacacctcacacagacaccacacagacacagatagacacaggccacacacagagactgatacacaccacacacccacaccccacacacagacaccacactcacaccacacacacagatacagacacacacaccacactcacagacagagataaacacacacaccacactcaatagacacaccaagcaaacacacaccacacacacagacacacacaggcagacacacacgccaccctgaccctgtccacctatactcacggaccatgcctcctcgttggctgcacaaacccacatagactcgcagtcagccaccctgcaagggtcctcagccatgcgtcccctcccccacccctcagccccgtcagcccccgctggccaaggctggagctccaggcaggcttcctgggctgggtgcccctccctttgccctaggagatgtgcagggcaaacgagcacttccaggggattcccggggggcagggctgcggtggcttcatggacggggagctggatgccggccccctgaagcctccagcatggggcttgtcacctccttggggctgccctgaggaacctcctgccccctctagagccaagtccccctctgcaccctctggggtctgggtgggcacgaagggggccctcgtctttgactctccatattcccctcacgctggcctagggtggcctgcgggccccacctcactgatgtcctggattggaatgagggagttcagatgaaggggcccccacaccgtgtggggcctggcccatcggggctgccctggcctgggccaagacccaccatctgctccaggccatggagacgccttccccaggctcttcgtccaggccagacccagttctctgactctgagctggtcagggcagaagccccatcttggccatcagggcgccggggacctctgacctgctgcctccgtgtgacattccaccactccagccggattcttcctctgcaaagtgcccaaggcgccatgaagacgtgaagatatgaatactcctgggctacttgtgatgggattggagggggtggggcacggtcctggaaggagccgcttctccctagtccggtggggctcttccctgaggctgcagagattaggcagtggggttctgaagccccagtgctgtcctccctcccgggaggtggcccagaacggcaggaacaggcttgcaaatgcgcaggtgctgggctccatctcctgaggcatttttagggtggatgccctgccctcctgggcagagcagggcagtcgctgcctaggggcgtccctgctcaccaaggtcaccactgtcattcaccatcactcttttttaattattattattattttagacagagtctcgctctgtcacccaggctggagtgcagtggcacgatctcggctcactgcaacctcccctcccaggttcaagcaattctcctgcctcagcctcctgagtagcttgggactacaggcgcctgccaccatgcccagctaagttttgtattttagtagagacggagtttcgccatgttggccaggctggtcttgaactcctgacctcaggtgatctacctacctcggcctcccaaagtgctgggattacaggcgtgagccaccgcacctggccaactctttgttaattattattattactttttagagatgggagtctcactctgtcacagcctggagagcagtggtgccaccacagctcactgcagactcaaactcctgggctcaagtgcctccccagtagctggggttacaggcacgtgccaccatgtccccagctaattttttattttttgtagagatggggtcttgctatgttgcccaggttggtctcgaactcctggcctccagtgatcctcccacctcggcctcccaaggcagtgggattacaggcatgagccaccacacctggcctagtggccagcactcctgactgggcatcactgcccattcagactcacaactgccagtgccaatcattgcctactgggctttactggcagaagaaggttggcattggcagtggtagtggccactaggtctttagagtaatgacctggataaagacagcaaaggcgcccagattcctgagaggcttcccctgcccagcacagggtctaggggaggatgcagccttggcaggtattgagggtgagggcacagtgcccatagttggttccttttgaaccctggccctccttctggtcagctgcaggccacagtccccaacccttggctctgatccttctagaggacagtgggctgggctgtctgggcaggagtcacactcatggccaggatgggttgaaaatgggaagtggcccccagtgcctggtgggtgccagccattcttcttggctgtgggggcggctgcctctgggaagggccttagtcacccagcagcggcttccgggaacccggtgcccagtctctgggaaacatcacaggtttttccagcgggacccccccaccctgccctggggtggaccccaaggaccacggtgcagacacctgctgggaacgggccaggctggctctccagggtccctgctgcccccaggctgactgccaagctacccaccgcctctgcctacccttcgtgtggggcacagagctttgacctgcacttgcctggctccagagcccttcttggctcccaagaacccaggataaggcctgacactcggggtttttgccacctccatgctgccgacttctgtcaccacccccctccgttcctggcccctgcctcagccaagcggtcctggatattcctccctctgtcctacccccgagacatcaacagagtcagccccacccacccctccctagcctgcaggtcccatggctgtcctgtctctctagggtgccccaaacatctgggtgaggggcggccatcccaccagcgcatagcacactccctggaagactggaagattgtagatctcctgtctagtcctgttcatccactgagaactgggggctcactgaagcccaggctggcaggagtccctccccgcagctctgaagcccgccatccctcttcaggcactccctggccgctgcgcctccctgtggggtgggtagggggctggccctggaggccgatgacctgactttgattcccagctcgtctggtcccagcagccctgagagcccgcctgtgtccccctttcattgtctgcacctaatggggatcgtgtttgtgcacacaccatacagcagtgacatcggttcgtatgcaaggggcctggaacagtgttgggtagatagcaggtgctccgtctgtgctagctactgtcatggctactattgcagtctagcccaatgctatctttgtgttctcactcctccctggccagcagcggtggctgggagaggggtccaggagagccagcttccccatgtgggaagaggaatcaggccggggctgggcaccctccgtgagaggcacttctagccaagggtgccatgcagcctgtggccctgtcccctctccccacgcggccttctcacctggatacatctacagccagaagcacgtgtgtctgactccagagccccactctcccttgcacaaggtctccacctctgttccctgacctcggcccccacgagaaccctgcagacccccactgtggaggatctgcgcagcgagcctggtaaagggagactcaggagcccaagctcccacaggcagcggggtgggggccgtggggagcagcaggagccgttggtgtgagggagtggccaggccccaaaacagttagtctgtgctggtagagagaggctgggctcagggttgggccgagccaaattctgcaggtcacgtgcagctcagcccagccccttcttctgcagtcgcaatgctgaagacagggcaccaaggctcagcccagtcagtacccacagtccttggtgtgaggacaaggccagaccagggcctggagtcctccccattcctagcttggggctgtggctcccagctccccagcacaggggactccttctctaaccccataaggggatgtagatagcagcccctttatgctgactgctcacacctccccagacaccgcaggatgcagccaccacgccaaacaggtgttgagtgctccatttcacagatggggaaactgaggccctaagagggaaagggcagaggcatgggggccaggctctgggtttccatccctgtcattgcccccagactctgctgaatgtccccaccctcaaacacagcttgctgggctggagaagaccttgactgcccgaggtcgcaggtctgtccactgcagccccagccctcagccctgctggggcaactgctagaagccagcacgtcctgaaagcgtgagttcgttattccagctcatcttcccaggacctctgcaaggcaagcctgtgttgcagaagaggaaggcaaggcccagggagaagaggtgacctgcccagggtccatggccaggaacgagtggtattgagacttgaacttgggtctatctgagcccaggatcaaagtgtgaggagagtgaggcccagccatccaaggtctggtgcagggagaagcgggaaaatgaggccagggagctctgtggggaggggtcaccagagtggggcagggcttggcatcaggggcaccggaggctggcgttagctctggtatctattgcagctttttttggttacagggtctcactttgtcacccaggctggagtgcagtgctacaatcacagttcactgcagcctcaacctcctgggctcaaacgagcctcctgcctcagcctcccaagtagctgggactacaggtgtgcaccctatatccagctaccatttcattttactttttttttttagagacagtgtcttgctgtgttgcctaggctggttttgaactcctggcctcaagtgattctcccaccctggcctcccaaagcactgcaattataagcatgagcctctacatctggccagtttagcttttaataaaggccacaagagacataaatcagcgtgatgagtgagtgagtgactgtaagggtgaagactgtaggtaaggaggtcaggaaaaggatccctggtgggggtggggtggggtgatacttcagcgaagatgtaaaggacaagaaggagctgaccaagagtctagaaggggaagagtgtaccaggcagagggagccaccagtgccaaggccctgtggcgggaatgggtttggtgtatttcaggaacagacagggaccagatgatgtggttctcagatgcagccacccccaccatgcagatgacctgaattttgccccggatctgagtggggttgggttctgtctagctccggtcaacggaggatgccctggatcttgaagtgtgtggagggttcctgctgccacggaccaatagatggaggcctgtgacttttcctgggaggacgggccgggggaatacaggcactgatggcagcttgacacgaccgtagcagatggctcactcattccccgctgtgccccaggccgacccacagggccttctgaccctctgtgtgaggcatggagggtggtcctggggcagtgggaggcacgccagctctcaggacccattgcagcctgccctgactggatgcagccaagcctgttaacagcctctgaggactgagaaatccaccctttctggcactctccccagggaaagtgagccatgggaggcttgggtggaaagcactgacgagtttccactgagccaggggtgggtgtttcagaggggaagggaatatagaggcccagaggaaaacaatctgagctggcatagaggagagaagttgcagtgggtgaggaggccggggaagccctggaaagaagccctgagggcaggcgacggcccaggcagagatgcagggacagcgtggctgtgtcaagccagagcgggtccaaggctaaaggggtccctcgcagcctctgacacactctcaccaccttgccgggagcagacacagggctggctggctgggactctcttgctactttatctcattcttctcaggaacgtagctcagagtctgaccttggccttcagcactttcctatctgaagtgtccatccaaagcgaagccatcctccaaaagcccagatgaacacaccttgacatctgtctcaccacccatgactttttgtaaagaccccagtcttctcactgcacactctgcttcaagcacatgtctttgtatcccaattctttttttttttttttaaacatgtttttgtagaggcagggtctccctatgttgcccaggttggtctcgaactcctgacctcaagttatcctcccatctcagctttccaacttgctgggattataggcatgagccaccttgcccagcctcaattctttatttctgtataaactgtgtagtttaggtacagatagtattctttttggttttttccaaaagaaagcatctgcaagcatcgcaaaggattctttttttttttttttttttttttgagacgaagtctcgctctgtcgcccaggctggagtgcaacggtgtgatcttggctcactgcaacctccatcccccaggttcaagagattctcctgcctcagcctccccagtaactgggattacaggcgtctaccaccacgcccagctaatttttgtatttttagtagagacaaggtttcaccatgttggtcaggctggtctggaactcctgacctcaggtgatccacctgccttggcctttcaaagtgctgggattataggcgtgagccacagtgcctggctacataggattcttggtggaaatttttcctttgcacctagaaggtgttacccactagtcttctgaccagttgctgagctgacatgtctattgtgaggcaaattcctttgtagtatgcattcctttgtagtatgcatttcctcctggtactttcaaggtagtatttttgtctttaatgctttttaaaaattacttatttatttatttgtttgcttatttatgtattgacaaggtcttgctctgtcacccaggctggagtgcagtggcacaatcatagctcactgcagcctccacctcctgggctcaagagatcctcccacctcagcctccaaagtagctgggacaacaggtgtgcgccaccacgcctggctaattgtcagtggtctttagttttactgtggtgtgtttgttcttaatttatccttcttaggactcagtgtgcatcttcaatgtgaggacttcattccctagttctggaaatttctcaactattaattaggttttgaggttttccagttttcaccttctgcaattcctattatatgtgtgttagcccttcttggcccttctcattcatatctccaagaatcttagactctcatatattccttgttttcatatctgtgtgctgcatgtcatgaaatttcctcagatatgctttatatttttcttattcccctttgagctgcaactaatttgctatattcgctgagcttctatattatactgcaatgagtattttttgaaggactctttgatttcttttgaaatctacttgttattttaaaataatatttttattatgtcttccactctcttttctatcttaattattttaagtatacttattattatgtaagtatacttattatgtaagtatacttattattatgtagtcttttacaaattgttctaatatctctagatctaagatctcccactgacatagttgcttgcttttttgcgtcattcatgattactttttattgtgagctcatcttcatcggggttaattttcctgtggatctgtgtctgggctgtgaaagtgtccatgcaaagtagcttggaagtaagtttctttcatggctgtatatacatttttctttttttttgagatggagtctcgctctgtcccccagggtggagtgcagtggtgccatctctgctcactgcaacctccacctcccgtgttcaagcgattcttctgcctcagcctcccaagtagctgggaccacaggtgtgtgccaccacgcacggctaatttttgtatttttagtagagacagggtttcaccacgttgaccaggctggccttgaactcctgacctcatgatctgcctaccacggcctcctaaagtgctgggattatgggtgtgagctactacacccagccatggctgtatatacatttttatgttaatttctggatttggagttttagaactattggactgtgtacatttgaatccacacttaactttttcctgccattgcctcaggaggatagaaagcttcactagcacttcttttttttaattttttattatttttttttgagattgagtgttgctctgttgtccaggctggagtgcagtgatgtgatcttggctcatggcaacctccacctcccaagctcaagcaagatccttccacctctgtctcctgagtagctgggactacaggtatgtgccaccactcccagctaatttttgtattttttgtagagatggggttttgccatgttgcccaggctggtcttgaactcctgacctcaaatgatccacctgcctcagcctcccagagtgctgggattacaggcatgagccactacgttggccttgctactacttttttcggatcagctttacacatcccttttgtacagagcagcccttccagccctgcagtttattgaagggggtcggttccagctcgccacctcggggagtccaggactcatatcctggccctgtgttctgccctgattctgaagtttttcccgttctttctagcctaagcccccaaccctgggccttgtggctccaaggtgcctcacttacgttccatgatacagctcctggatctgctcttgaataaaacctcccagtttcaccatctcccttccggtcacaagggtgctctttccggctccaggctctgcaaggcagttgtgctcagagccccagagcaggccctacagcacagatcctgcagacgggcacagcctccacctcccaagaactccaggctctgactcattagtcaacttagtccatagctttctagcaaaaaaaaaaattgtgacgcaggccaactgagacctagaactttttagtcatggaagccagggtcttttggtgcacctggatcactgattcttgacctaggatagtcttgtactctcaggagacatttgacatgtctgcagacatttcttttaagagaaggggtctcactatgtcacccacgctggagtgcagtggtatgatcctagctcactgcagcctgaacctcctgggcttaagcgatcctcctgcctcagcctcttgagtagctggaactccaggtgtgccccgccatacctggctaatacttatattttttgaagagagaggggtcttgctatgttgcccaggctggtctcgaactcctgggctcaagagatcctcccgtctctgcctcccaaagtgctaagattacaagcatgaaccaccgtgccctggagacatttttgatcattgcaattggtggtggtgatgggaaaattgttcctggtgtctagtggatataggccagagatgcagctaaatatcttataatgcacggaatggccctaacaacacagaagtatccaaccccaaacacccacagtgagtcctgaatcccgagggggtgagccctctgtccgctctgggtagagggatagagaagctggctaaggccctatcccagggtattccctgtggggaagcttggagctgaggctgggactggaggaaggatgtctttcatcagatctggaggacgccagatatcctgactgctcccggctggcacagggagcctcatctgagcccacgagccagggtgcatcccacatcccacccgatctgcccacgaggcctcccacccggcccctccctggtgcagccctgcacacacgcgccagccacacgcacgcctgtgtgatgtggtgagcaggccccgtatgatgtggggaacgggcgtgtggtcgttggagcaggccaggccctcctgggggcggtgaggacatatctctggtgccatctttcctgttctgataaataactgatctgtggttgaggcaagaaggtcacctctgcccagggaagctcaggaacaaaccacttgtgaccggtgggaagagcccgggggggcagcgggaagtctgtcttccctggccaccgggctgctgggggcagatttcagaaaagggaagtgctgagctggggcagtgcttcctgtggtcgcggcaggcagggcatcagggcgggcacggcaaatcagaggggtgactgccctagcttggaggggcaaggagctggggtccctggctgggccccatgtgctgccagccttcatgcattgggctgaaggcctgggggggatggaggaacatactagaacaccaacagcactgaagctcccctgcttgggagtgcccctgggctcctctctgcactcagagtgaagtccccctgggcttcgtgatttgctcctcagcctctgcttctctggcacctgctcgtcaagttccctctgcatagggcccccttctcccaccagctctgagcactggggtcggtggagggggcaccccctgccccttcccctctgctaagcccggagcccctggcttggctgctctgggaaccctcttcatccccaaaggaaggcctgagcccaggagcctgtgagatccttcccaggccctggcgcccctctggtgggcagctgtctgtacccctcttctatacttaggggggatctggtgcaggggcttaggagcaagggaggtggccgggcctctgtagttcctggagctcccatttcctcttccactaaactctcagcatcaccacatgacccagactgtgaacccaggggagtgctcggttggggaggggagtggagggaaaccggctccctcctgtcccagccctgagcaccagcactgcggttccagctccctgcaggcacttcctgcctgctctgggaaagcacagatggctgccacgccatcacagccctggggttgagcccagacccccgaaccttgactgtccagccctgccagaccccgtcaggatccacatagacccgatgggttgctctgtctccttggctctggccgagtccatggacaaggagcatggctccatccgccccgctcagctctgtgcagcccacagccctgcctgccccacctgagggttggggctctctggactggtcaggggtgtgtgctgtccctgccaccctgccccagctgaggcctgtacctggcaggggtcgagccagtaaaatcattgtcctgccctaacccatggtgtctaggcagtatgggcagggccagggagggcccatccagcctcgcaccccaccactcaccgtcttgctctctccttttcactccctctgtctcctgaccttgggtcacctcttccctttcttgctctcactcagtcccttctctctgtttttctgtttcttattttgagacaaaatctcactctgttgcccaggctggagtgcagtggcacgatcttggctcactgcaacctccacctcttgggctcaagcgattctcctgcctcagcctcccgagtagctgggattacaggtgtgcgccaccacgcctggctaattttgtatttttagtagagatggggttttgccatgttgaccaggctggtcttgaactcctgacctcaagtaatctgcctgcctcagcctcccaaagtgctgggattacaggcatgagccactgtgcctggcctgtttttctgtttctctatcactttagtaagtccttctagcccccaggaccccccagcccctctctgtatctgcacacatttgtcagtctgtccctccaccactgtccttgtttcctctctcttcctcgtcaccctgccctgacctggggggtttgtgtctctctgtctctctccgcctgtctccatctcccccttatcctcactctctctctgtctgtctctcattttcattctctttcctttcctctttctttttattttatttgtatgggtccatagcaggtgcatatatctacggggtacatgacatactttaatacaggcatgcaatgtgtcatgatccatcagggttaatggggtctccgtccctcaagcatttatcttttctctgtgttacaaacattctcatcatgctcttttaattatttttaaatgtacagtaaattcttggtgactgtcatcaccctgttgtgctattaaatactgaatcttttttttaaaaaaattattttaagttctgggatacatgtgcaggacgtgcagatttgttacataggtcaacgcgtgccatggtggtttgctgcacagatcaacccatcacctgggtattaaggcctgcatgcatcaatcctggatcttagtcattctacctaaccatatttttgcacccgtcgaccattcccgctgccctcccctccctctctttctccccctctctcattctctccccattttcattttctctctctcttctcattctctttcttcctctctctgtctctgcctctgcaatcacccctggtcttcgccctccctgtctctgctccccggagtccctgcacgtggcttgacagtggccttggtaggacccactggggtgtttcttcgtcgcccatgggccctcatgctgttatcagttggaaatgaatcagagattaggaagcggggggagtggtgggggtgttatcgcccagtgcacacggggctctcagctaatctctggcggccctgggttcgagaggaaatgcagttgcaacactgagtccttcttaccgtcactgtcatgtccgcggcgaggctgtgggggacacgggcaagagattggagaggggagagggagaggagagagggcctggcctgagctcctggcaggcgtttgtacaggctcacgtgcacacgtgtgcacacacagcatgtacacctcctggcccttgacacctgagccgtcgccaggccttgcctgtcacccttccattgcctctgcatgcccgcacctgtccacgtcttcccctgccgccccacgtccccagccaccatctctcttcatgggatggcagctctggcctcatccaggctcttagccaacagagtggccatattattattattattttattttattttatttttttgagatggagtcttgctctgtcgcccaggctggagtgcagtggtgcagtgtcagctcactgcaagctccgcctcccaggttcacgccattctcctgcctcagcctcccgagtagctgggactacaggtgcccgccaccacccccggctaattttttgtatttttagtggagatggggtttcactgtgttagccgggatggtctcgatctcctgacctcgtgatctgcccgccttggcctcccaaagtgctgggattacaggcgtgagccaccgtgcccggcccagaatggtcgtattattaaatgaccacatgatcgggctgctttccgaacttcaccttcccacggttctaggaagcagccaccattatcatggtggcctccaggcttgcgtgtctagctcctgtccttcctgccctcacctcccacaccccttggcttcctagcacctgcagttctgcctcgacccctcctcagtgccccggcttttgcaaatgctctcccctctgcctggaaaactctcctccccatgacaactcccatgcctcctatggcactcggctttcctgtccttcatgaaagcatccagggtccccgagtgccaagctgcagcaggtcccttgtctcggggcttccaccctcgaggcgtgagctccccctgtcaccatcctgcctagggattatgggtgtaattcctacttcctgctcacctcctgccagactgtgggcctgatggggcagggaccgagccctccagtctgtctagggcctggccgcaccaggcagtgattgaatgaacagatccataaacacaccgagagacacggatgtacccaggcccatgcacagacacacaaatgcagtcaccagccatgcacggaaactcacattgacagacgctcaacctcacaaacgtgcaaaccaaagttacctagagacgcacgcagtgaccaagacacacacacgcccactgtcttctgtctatgctctgggctcactgcctctcatccagccctgcccctcgggcaggatcccctgcgggtgtgggcctcctgcactgcagccctggccttagctccagggggccaatcccatgttatgggcccccagcaggattctctgggccccagccgtggtcttgccacgtgactacttacaagtggcttttatgctaaatgcacataatagcacattggcataatatcattgccaatactcacaggtaccatggttcacacagggagcatggtgtgaagctcctcttacagggcttgttagaggaaagttccagctcaggcaaaggcttggggtggagcggacaaagctacagtttggccttttcctcagcagcgtcctgcttctagaatcaccactaaagttaacccaggcgaggggttctctcccagcctccaggaggctccagctggaggcaaaccgccggtctgggagaggtacagtggccagggagaggaagggtttcagggtggtgtgggtggtaggggctgaaggcaggggcagcagggcagggcctggaggccagcagcacagagggtccccacctggcttcattttgggggagggggctgggcagggtatctggcggaggaagcaagaaggggtggcctcagagactggcttgcggagatggggctgcattccctgtggaagggagtgggccttcacggcttcaaggccgtttgtcacctaaagcagctacgggcatcttctctcttccctctttctttttagagacagtgtctcactctgtctcccaggctggagtgctggggtgcgatcatagctcaccgcagctgcaaactgccgggctcaagtgatcctcccacctcagcctcctgagtagctgagactacaggtgggcaccaccatgcccagccaatttctgtattttttgtagagatggctgtgttgcccaggctagtctcaaagtcctggccttaagcaattctcctgcctcagcctcttaaagcactggtattagaagagtgagccatggcgccctgcctctcttaaagatggctttaaccatcacttacagcacagctgcatccctccttggcggggtgggggagattctttcccacctctctgagtgtccccatctgggtccttgctcagtgagagccagactttctgctataaccaggccctgaatgagagagaaccagagtcatgtgctgtgcaccaaatgcagtgggaagacacgagggatgcctcggtgaccttcttttcaaacaggagtctttccctggtaacctgcctctgaccttccatcagccagatgttatcttcccaaggcaacagtgttccagaattctttctgaggtggccctggcagcttctgggtccttctattctgatttccagttttctttttccatttatttatttatttatttatttatttatttatttattaattatagggtcttgctttgttgcccaggctggagtgcagtggcacgaacacagctcactgcagcctcaaactcctgggctccagtgatcctcccgccccagcctcctgtgtagctgggactacgggcatgcaccaccatgcctggctaactttttatagagatggggtctcactatgttgcccaagctggtctcaaactagcagactcagtgattctcctgcctcagctttctgagtagctgggaccacaggtgagcaccattatgcctggctaattttttatagagatagggtctcactatgttgcccaagctggcctcagactagtgggatcaagtgatcctcccacctcagcctcctgagtagctggaattacaggcatgtgtcaccatactgggctagtatttgtattttttgtagagacagggtcttgctatgttgcccacgttgtgcttgaactcctgggctcaagcgatcctcccaccttggcctcccaaagtgttgggattacaggcgtgagccactgcacccggctccaggtgcagtggagccggcccaggcctcaccctttctccagacctcacattcccaggctcgttgaagggagcagggtgcttcaggcaaacttggggctcgggtctccaggcacttggggttttctcctcccccggcgctggcagctggcctggcttctctcggctggagatgctgaagactcctcggctggtctgagaagcatgagaacagagctgggaaaactggccgtttttgtggtttgggggtttgatgcaagtttcacaactgatctcccaagaacacggtcggtccggtcagatgcgctccctggccaggggcctgcttccctgctgacgccggtgctgaccgcccgaggcgggggctccactcgccctccccaccccattccccgctttccttctttagggaacagcctggaggtgtggagaagatggctttgttttgggggctttcgtggtttccacctcatccttcagcctggggagagctgacggcctggtacccctcactctcatcctggagtttttctcagacacctctgggcagctgttcttaaagctttcattttgaggggacagtgggccaaggacgtcttttgtagtgataatcttgggccggggctgatgagtgggaagtcttagaaagacctgctctagggctccgggagagatgagggccgccagggaggcacacacctccgtagccagcccactccaggaacccagagctgcctccccggcagacagctgggctggggagggggtcctcaagacctggccctgcctccaagtagcctggcccccggacctatccttccaccctgggaagtcccgagctgcctcaggccagctggggcagaactgaaattggtgacatgtgcctctctggtcccttgactcccgcccccgctccctcacccccagagtcttcctgaaggagcctccagacccagcgaggagccacaggcaatgcccaccctgagtgggagctgctgtcctgccttccacgtggccccagcctagctcgcccttgcgtgaactgggagctgccccacttccggaggttggtgcgtggttctagatcctgtcgtccctccgcttgggggcacaacgggctgggacccatgcacgtttctcagacactccatctctcatctcacagagcaggaggggtctgcaaagggcaggctggtcaggacacagtgtgaggcagggggccccggggaacagagtccaggctccacctctgctgagcaggcagtcctgagtgttgttaccaagtttgggtgagggcctgggaccctgtcacatcacagctggggaaacggccagggctgggactcagtggcgaacagcagaacccaacaggcggccgcacagactcacgaccagggggctcggtcagaggtggggacagagggtgacctggacttgctgagtcaaggagtcaggccagcgctgcggagaatcccacagggctacgcttgggggccaaggagaggcacgtggccaggcacatctgggtggacagaggggttccagccactcacagagccctctcagtcagagccagataagcctgggcaactgagccactcaggcagggagcgggcgggcatctgaggtccccagggagtctgccctcctggtgggcacagctgggcccagatgaggcccacagcattgggactgggcagagacacccagacatggctgctgctgtgggccccaggaaggccccatatttggggtgcatctgccgggtgcctgcgtccccttcccgttccctatccctgtgcccccctcccagcttcctgtttctgttttggggctgcaggaacttcctcttctcatcacggaccaaaatggcttcttggtctcagctgaaggcctggcggggggctggtcaccccagcctgaaggacagccacagagcgaggggggctccgagcctctgggggcggtgacatctgccaaagggtgaactgtggccctttcccaagagactcccacagctcctccgatggagcctgtcatgtgagcacctgcccaggccacggagggcctgggtcctgctggagtgaccctaaacggcccccttgtgcccttcccgcctcacgcaagggacccaaaatatggattgcctggtctccccttcctcctgctccctcccaggcacatggtgcagacacttacgggcaccgtgttggcctatgtgtgtggatgagcaaatacacacacacggggtaggggggtgccctgagcctgtgaccccctgagccggtgacccctgcctgccagggagcagagctgcagattcctggatgccgagggaatagaaggcctggcccggcctgggcagtacatggtgagggtgtgtgtgtgtgtgtgtgtgtgtgtgtgtgtgtctgggtgagtgtgcctctacgcatgtctagggggcaccatccttttcctcccactccccctgcccccttcccctgagcagagctgctcccttaaataaagctgagctgtgccctttggagcccctgggccctcgagggagtgcagggtgacagagtgggctccccttactcctgggactcctcactcagggggagcctgtggtgggtgttgggggagggcgtaggaggtgggcacacgccagggagggcacacaggatggtggcccctgatcccctggagttgtgatgcccacaggaggggtgctttaccaggcttgggcaccccaggaacatcctggccttgggatggggtgtgggggtaaatgggggacggtgctgagaggccgagccccggtctacctccctgcccatccaggggtcccgggatggagttgaggagccagatgcatcctctggggggttgtggcctgggtcaaggtcaggacagcgccagggaaactcctgctaccagctgcccctagccccaggctgccgctgctgtccagaattcacccagcgttcactccatgccaggcaccaacacggacagctcctttaatgcccgatgtccatccttgtcacggacaggtgagtaccctgtggccaaatgggcaggaggttgtggagcctggcacccacactgcagagatgccgaactctggccagcggcctccctccccaaggcccgctccatggggagacagtgaggggaacccacaaagcctggggtcactgggtccccctagctggcacctagcttgtgcccccattagcacagagaggaggcggtaaaacaaacactcccgactgtttaccccaacatctcggggccataattaagcttccttcaatcgggcccttatcagcccggtatcttgagcagcctctgacggggaaacatcccggagcatctaacgaaggaaagttggacgccttttgagactttttaaatcctgaagaataggcctctgttgccagctacccgcctgtggcagcctgcctcatctctggactctgccggctgccccaggggcaggggcaggaccaggcggccccagccctggcaccccagccctgctgggatgagcccccaggccctgcccaccatctggctcctccaattgcagtgtccctgctggccagcggtggggtcctgaaggcaccccctcttctgccctcaatgccccacctcaccctgccagatgccaatatctgccttcggcaggcacccttgccagcctgggccaaacccaggtggtgggtggggctggtgatgaagggtgagctctcattgcccacagccccccatcacctggttctacaagttccccaccaaccaggtccagacctgccactctcagcctctgagctttgctgaagctgttctctccacttgcaaggcttgtccctgctccttcctcctggataatttctgcttatattttaagacttagcttccagatgtggcggttcatgcctgtaatcccagaattttgggaggctgcattgggaggattgctggagcccaggagttcaagactggcctgggcaacatagtgagaccctatctctacaaaaaattaaaaaataagctgggtatggtggtgcatgcctgtagtcctagctactagggaggtggaggtgggaggactgtttgagcccaggggttcaaggctgcagtgagccactgcactccagcctggccaacagagagagactctgtcttttaaaaattaaaagaagacttagtttgagtatcactccctctgggagccatctgtgcattccaggtcaggctcctgtctctcctctgtgcccctccaacttcatggtctccatgccccaactccgtgtgtgtcccttggggggcagaccttgggtatcaggccagccctctaccaggcccagagcagcctctacaagtgctcagcttctgtgtattggagttaagaaagcatgacctggggatacccatgccgcccagcagccgacggtaaacctggagtcctcaccgccatgctctgagggaggttctgttcactccacatcataaaccggaaacagcgctggagcagaggcgacagctgggtgcatggtggctggagagcctaggataccaggcaacaaaccttttctgcaaagggccagatggtaaacattttaggctttgtggaccggacagtcactgctatagcttttcaactgcttttgcagggcaaaatcagccataaatgaatgggtgtggctgtgttccaataaaactttatttatagacactgaaacgtgaatttcatatcattttcatgtgtcatgaaatcttctttagattgttttccaatctggtggcaggctgtatttggcctggggactgtaatgggctgattcctggtgcagggtgagaattaaatatgttttcccacctggttcagggccagcctggtcagtcctccctcagggcccagcagctgctcggaggaggaagcagagtcactccatctccagcccaagtggaggacacaaatgagtgaacaaactcacctactatctaaccaactaaccagttaactaagcccttatctcctggattcagagttacccccgcctcctctctgtttttctgtttttttttttgtttgtttgtttgtttgtttttgaagacggggtctaactgtgttgctgaggctggagtgcagtggcacgatcatggcttactacaccctgagctcatgtgatcctcctgcctcggcctcccagaaaggtgggattacaggcatgagacactgtgcccagtcctgtgggcttctttagacccgactgaccccttgttgtctgacctatctctttgacccctggccaggtatcttttcaccccctcaacctgcccaaggtggtgggaacctcaagagaagcccattgagcgcctgaaagctgccgacgaccactcactactgatgtggtgtggcctggcctacagcctggtacaggctagcagaggagatgtgtacagcctcagggctgtgtgtgatggggaagggggctttgggactgggaggggtgtctggctgcacctggagaaggggagggaatggccaggcagacagaggagacattccaggcagtggaatgtcctagacaaaggtgcggaagcgggagctggcggagtgcggggtccctgtaaatccaggacactaaacgcaaggggcttctcgccttgtagggccaaaagccagggcagagctaagcccaccaggagcaaaggctgtggccctacatccctatcctagcactgacccatgcaactggacctgcctatgtggtatgggtcaggaggacgccaggaggcccccacatccccctcctagattgccgaaacatgaatttcatatgattttcatgtgtcacaaaacactattattcttcagattattttttccaaaaaatctgggcagggcatggatgatgggcaggccggacatgtggccattcctatttccgacctgcatttgggttcttcagcattgccctctctcggtcattcattcactctacaaacactggtccttggtgccaacaacctgccagataaaccccttccaggatgcgaatgagacagacacggtccttgcccttgtggaactgacaatccagcagggatgactgacaggtacagtgccatttcagagcacgagaggtgcccgcaatactatgcatctgggcagtgaccaggggtggcttcaggaaggcctccccgatgaggaaaaagaccagccaaggaagactcagcaggagctgccatgtgatgtcctgggggcaggaggcagctgtttgagggacagaaaggaaccgccacagccaagggaggtgcagagtacggaggtctgtggcaggtgggtggccaggagggcctcacagaattcatggggtggctgcaagcagaagaggctggaaaggctttgggggctgggccaggaacacgatctgattgacttttgcaaggatccctggctgctgttgagaggtggagggcaggacctgcagggcgggaggccggtgctcctgggaggctgccgtgtggataagagtcgggggccaagtctcccgctggagcagcatggaaggctgggccggacgtgggcggtgggcaggccccaggactgctgctcttggcctggctctggcgttggcttagcgtgcagccgcgggggagccgtgtgtgggcacgtccctgtgctgccgcccccgctgccccagagacacagccataggcaggctggctcccctgggcctggctcacacgtggtggaggtgatcagggatgacgaggcgggtcgcagggtggcagggacctacagggccccaaggccagcccgggggacagaggactcccttgccaggtccttgttcattcatcccccccctttgtatggtgagaccactgggagccagacacagccctgccccaggggccatggggaaacgagtgtctgtctctggtccggggccaacctcaaggtgggtgtcctctcctgcagcagggccacgggcaccttccggctccagccccagcccagccaggctctgagggagcctgaggctgcctctcctcctccaggttcctgtttcccgggtggccccaaagacagaagatggtgtgaggttcaagggctcagtcccaggctcggatttcctgggcgtgtcagatttcctgggcgctgtgtggctggtgtctgccagggaggccactgaataacgtgaagaccactgggaaagcatagcagagtgtgcagtggctgagtctgtgtgtgtgtgtgtgtgtgtgtgcgtgcgtgtgtctgtgtgggtgtggggtgtgactcacacaggcctgggcttcatgatgtctcttgggagcaggaaggtctgtgtgagtctgtgtctgtctgtgtgtgcatgtgtgtgtgtacccgtgtgactacaagcatgtgtatgagtgcacacagttggtgcaggtgtacctatgtgtctgtgcacatgtgtgtgcatgtctgtgagcgtgtgtgcatgtggttatgagtgtgtctgtgggtacgcatgtgactgtagtgtgtgtgactgtgtgtgtgcacgtgtgtgtgtgtggacacagccctctctggcctgcactcctggagcctgttttcctgctccacctccctcctcggcaagtgttgactcagggagggataggcagccttggttcaggatttcctggtcaggcagaagtggtgccttgaaaagggaacaatctcgtgctaaagtggacgctgagggtccacacagtgcagtgctctagggtgcccaaggccgagagaccttgtgccttccttgcctgggtttacagtgggggtcccagaaagctttgcccctagggtggcccataggatgtgccctcaggctttttctaaatgcttcctgatctgggctgcccggggtgggggctctggagctggacactcctctgactgctgtggaggcagggacagcacccccacaagaggtaccccaagagaaatgggggcccccaatgtccccaggcactagctgtcccaggttcccttccacagtgggcagctttacccctgcaccgccccatcccccaaagccttaacaaataaaaatgaagctctttgaggctaagagtctattcaagctccaagagctctctgccatgttgggaggagccttctagaagcgctgcttctctcaggggctgggagggctggcctcactgggtacgcctgagagatgcagcatcttagtcggcacccatctgccgcgtccacatctgggctgtaccaaggtcccccagaggcgccactgtccctgagagacgctgagtgagcccagggcccaaggacagcagccacttactgtgcaaatgccggaccttccctgtccccaccacctggattcctcccggggtggccctgggtcttgggtcaggcagggaggctgagtggggtgggcagccagcacagccaccatgtccttgtccccctgccccacaggggctgccttctccagctggaggttcaggcctaatccccaggacaaaacagggatttgcatcctaaaagctgctaatgcgggtgctgctcctctgtcagtgcccgcttatcgtagaggaaagacactgtccctggggcgttgggagccgctggtctcagctggttctagggatgatggagacacagctgggtggcatggagctcagctatccttgagctgggtcagcccaagcaggaaccccaagggggcccccgagaacctctagcccagacccctggactcaggcctaggtgcctgtcccactgtagacaccaccccagccctgcgtgctgccaccaaacctgtcccctgccagtgatgtgggcacccctgaccccttgcacccactgggactcttctcctgcacaaggtccctgtccccactgctgcttctgccctgtcccctccctgctgggtgtgacacccagaaaccgggctgtgggaggcaaacatggagctggcttggagagctttagaccccctttcttgccttggggaccccgggatcctggcataggcctgccctgagtggggaaagacgatgtcagagtccctgggactgcagagaacgcggtgtcctccgaagcatgcctgggtccccctgatcagggtggcagcagggggcagtgcctgggctttgggtgctggcccccaccacgctgagcggccacgagcagggctggccgggccgccattaatgattaacttggggcctgggccttgacctcgtgggcctctgagtaaacaggcctgctggagcctgccgggcccctcatggcctctccaccccctgacctctcctgccctcctggtcctggcctccctcacccacctttgctgctgaggtggagcagtggcaggcggtctagaggcgctggcctttctcacccccaccctggatcagcctaccgctgattcctgcccctggccccagcccattctctttggagcctttgaggtgggcttttcttcttggactggggcttgcccactggggtgtctcaagccctgacctcagccccttgcgtccacactgctggggcttgttgagactggccgcgtggagcatgctgtgtagacagtcaggaccggctgtcagaagacctgtgttctagctccagctctggtctcactggctgtgtgacccctagaccatgccctgtctctctgggcctcagtttccccatctgcacaataaaaaatagagcaggaatcccagggctttctaatcccagaattctagatgccagtctggtttggagtgagactgaggataggaaaaacatatgtccccaccccgccccagaggaccccttcccgaagagtcactggggtggacctccaagttcctggctgcccacactcacttccttcttctggggcagccccttgtgttcccttggaggaccagccctcaagctctcagaccaggggcttcaggcagggcagcccctgcctggggctctggaagtgggtcatatgacctgggcctggccaatgggtgtctgccctgagacttttgctggaaatactgagaaaaaaaaatcattttttcttccctagcaaagcaggagaatgtgagccccatggttatcttgctgggcacaaaggaaaggagagctgaggacccgacacgggttttgacgacggagccccagctgtgcccgaaccggcaccttgtggacttttccatggcaagaaccagtggattccttttctgctcaaaccagtgagagttgggtctcttccctgattcacacattcacacactggactcacaccatgcaggcacagaggctacaaatgcacagttgtcaccgttacacacgcaccgcgaaacatctgtggagaaaatgtgcgtgacaaacagggctggggagggaacccggctggccgcagtgagcaagggtggcagggggtgggagaatgtgggcccagggtgccgacccaagctctctccctgtcacttcacccgccatttgcccatcatccccacgtccagaaccctcagccggccattgtggatgatgggcgaatggcggctgaggtgggcaggctgaagctgattggccagggacagaggtgaatgctcctgtttgcacgtgtgcgtgtgttcacatgcacgctgagctttgcatgcaagaaacatgctgtggcccactcggggagcactttcagtccctccccactgcagaggcctgaagctcagtgagtcggggaggggtctctggtcagtcgggccctcctccaccctgggactgtgtggttcctgggagctcaagggccacctgggtgggggcaacccgaggagaagggactgcctcttctgctccactgtgggatagaaggatcaccagggccttctgcaggagcagagaatccgcctcatttgggcctccccagttctccaaggagtgctggcctcatggggctatactgggggagaggctttgttctggagcccaggctgcctttatgacactgggtagtccagggtcctagatgcagatggcttcaggcatattgcacataccacatgcacacgcagacacgcacacagatgcatatgggcacacgcaggcacagctatcttgtgtgagctctgcggatggaaaaggagaagctttctgtggacagggaacaatggcgacagaggaaccccttggccctcctgggaaggccccaccccacagcttggctcttgccaggccccttgggctctagcctggggaagggctctcagccagcagcaggaatagctggatcaggtgtctggagataaccctggctccctgctgctggctaaaagcccttcccccaaagctctgtcttcccctcctgctcctcttcctctccgtgccttgcttttggactttcaggccacatcacattcctttttcttttcttttctttttttctttctttttttcttttttttgtagagatggggtcttgctatgttgcccaggctgacctccaacccctggcctcaagggatcctcctgcctcagccttctaaagtgctgggatgactctgactctttctctgcttcctcctgtctctgttggtcccagtttctgtctctctaggggggcatcccaggagaggggcaaggttcaggcctcagggcttaagccccttggctgctgggccaggccttcctctttctgctgtctgtcccctgccctgcttccttactctggccagagccgacttgccctttgccctggagctgcggcacctcggggttgggggaactgatggcctcacctcccccaccccctgcagcccctgctcctccccacaggagtctggccagagagttgggccctggggaggccacacagccaggacacatgtcctggccccaggcagaacccttgccctggccacagagccacaccagccaggtcaactctgtcctctgaaatccctggagaccagggcaagccccccccacccactccctggggcagcttcggactcccactcacctccaggttgggaaaactgacccccagcccagggcaggaggcaggatgtggaagggcctctagcagagctgaggtccagccggccatgtcgggggaaggacgaccctgtaccctgtcattcccctcacagtgtgaggccccagggaataacctgccctggcaggggactgagaagcaggagcagtttcccagctctggagcatgctgggtgggagcaggcacggggcgtctctgggggtggggagcagcccctccttgcctaggcagtcactttctgggggccagcacttcccacactctcttttttttttttgagacagagtctcactttgtcacccaggctggagtgcagtggcacgacctcggctcgctgcaacttccacctcctgggttcaagcaattctccagcctcagcctcccaagtagctaggattacaggcgtgtgccaccacacccagctaattttttgtatttttagtagagatgggggttccccatgttggccaggctggtctcgaattcctgttgattctcgaattcctggtgatccacctgccttgacctcccaaagtgctgggattacaggtgtggggcatcacgtccggcacttcccatgctctcagagcattcactgctgctgtccaggtcagagtctgccagtgccctcctccaggaagcccacctgggctggaccagaagaggcaggagcctgaagcagccggccttcctccccaccacacaccgggaccggggcttcccctcgccacactgattaggctggaagtggggggcttccagcttcccacttctggaagaccccacctgcacccagcctgcctggggctcagggctgcattgaaaatgcctgactttccaccccagagtccagggcaaggcacagcttctgataacccctgggctgatgtttgagcaaggcccctgggaaaaagtcctcaggccttactgagcccagtgctgccgctgttgctacagcagacaacctggggcaacgtctccggaagctggagaacgggcaggtggggcagccacaaagagggctccagcggtgtcggctgcctcggtgtgcggttcactgtggctgtgtccacctgctgccttcctctctgggcacttccactgatatctgggaggaggccacctccaggggttgtgagcactcaaatgagacaatgtgggcaagtgcctggcctgctgcttggcgcacactgaaccctcaatgaatgcagccatcagccctgctcaggctggcagggttgtgaggactggaggatccaggtcatctctgcagaccagggcaaggcctactgctggacaaggggaaggcttgggactaaatctctgccttcctggcccccagagtccacaaggcacaaatgtgcacttgcacgccccccccaacacacatacacacacacatacacacacacacatacacatacacacacacacatacacatacacacacacacacacacacacacacatacacacatacatacacatacacacacacacatacacacacacacacctggcttggcttcccattacccagccacctgctggaaaaccaagagctgtctcttgaaaaggatgattaagaaccagccttgactactcaaactgaaactccaaaccctcctctggggtacccagctcctctggagcctgtgggcgaaaagctcttaccatagtggaaaaaatattctgccgaaacggaagtcttcctcaatttagctgagtcattttcttgtggttaaggaagtccgggttacctctggcccttcccctgatgcccatggcctagccagcttgggggaccccagtccacactcccgccctggcagggggcatgcccatcccggcaaacctgcagggcccttgattgtaagtcaccccactcaccccgggctgcttctcaccactgtttcctgtgctgaagtgggagtccagacccccaagaaccaggatccagggtcactgatcaccaggtcaccaggggcagctcctacaggcctggggtctgcctgcgcttcctgtcggggatggtggccccttgaggatagaggcctcctgtggattgacactctgctcctgtgtccccagcttgggcagctcttagcacgaggtcggtatcaggagcccagtctcccagcattcagcagctcacagatcccccaaggagccggtagcttggaatgagttcctagtggatgggcagtggaggggctgggtgccaggccctgcttagatctcagacccagttgggctcatggcaaccagggatggaacctgtttcattctggatcctaggagtctgagcctgcaggccaaggcacctggcccaggtgtggcagagccttgcccagtcggggctctggctggagggaggctggtgctggtgggtgccccaccctggctgcaggtggctgcctcctccccgggagaccttttggaaggtgccagaggctgttgtgggggaaggcggagagatgacggggcgggccacctgagtgccgtggggagagccttgaaggtgccaagtggtgccagttgcaggtggggcgtggaggccagctctgtgggcgctgggtccttcccctgcggccacaccgtgtgccaggaacgagagaccccctggctgtgcgttccaccctggccctccatctgagccctgggctactggggaggcagcaggagcccgggcagacggctcatctgagctcggccttctgtcagctgacaggggtcacgtgctgtctgggcttgcctggggcctgagaaatggggatgcggacagccattgtcagggctgttggggaaattcaaggaatggaagagtcagagggagttgggaggccatgtctcggtgtgtgcgggggcatcgaaagccctgctggatttgggggatcaaaggaccgccacgcatcacttgtggggtctcgggatgatgggggtcaggcctgctctttgctggggaggccagtggctagcaaggtctggggctcagtgaataaggccacgcttgcagccgcccttgtcccagtgcttggagagccaccaggcagactttatctgcatccctggaagtgacctgaagagactgccgggcactagaggggtccatgtgggacccggaacccaaaggatcaggttcaccaaagcctggacttccctggagggcccctgacccgtctcagcggccgtcaggcatccgccagctgggccctgcgggctgtgctgcccggtgactccagagtcctcccacacccacttggactgggtcctcccgtggctctggcagccaaggtttgggaaattaggtgaggggggcctgggacgagggtgaggaaaggaacaatttatgttcaaaagtcatcttgaaattttcaacatatttttttatttttcaaaacaaaagctctaaatgttggggctggggggtggcggtggacctagctttgtgggaagtgagtcagatggccataaaatgtgtttttctgagccgaggggattattttacatcttgtggcatggagacgccaggaggaagccctcctcctggtccctggtggggctgcctgctgctgggcctcagcactgatctctcttcttgagatgggggctcctgcccttccaggacccctcatcagccctctccctccctgacctcacatcccgttcttttaggcaagagtgaggctgggaaggtcgtggcttcatggtggggcctcgtactggctgtgccatgccagagaatctgggtaaagtatgccttggggaccctccccaacccctcgtctgatggataggctgatggcgggaccacctcccagaacagccaccagcatgaaaggagggatttgagaactcatttgcaggccgtcagggctcggcaagtgggtgccctcccacctccaagaacatccttgagtgcaggtgaatgaatgaagggcaaaaggggcaactaggctctttggagacccttcctaaagccagaggcgcaggggtcctcccctaatctccgctatcaacggcatcttccctgggaccacagcggggcagtggtggctcaggggaaaagtcatcttgaaatgttcaacatatttttttatttttcaaaataaaagctctaaatgttggggctgggggttggcggcggacctagctttgtgggaagtgagtcttcccagggaagaggacgctgagtccccacctcagcgaccagagacctcagaggggctagggtcagggactccagatgcccatcaggacaggacctggtggcttcagaggcctcagggtacaggtcccaccacccaaggcagggactgggtgggacccgtagggagggctccgcctggagcctcccatgccctctgcctcgctgggggctgctgtccactgccatgcatatcccctgaaccctgccttccctgggctggagtcacaggccccatgaacagcttggggtccaagagcccacgctgcctgtgaagggagacccctggtagcctgaggccggcagaaatggggaagaaatctggggcccaaaccacactggctgattccagaaaccctccacccttctcttgaagctgcagtaaaggggtctccctgagccatccccactgaccatgggctctgcttcttcctgggaccaaggccaggcacagtggacacccactgttttgcctgtctcagcatccatttctctccttccaaccaacacatggattttccttggagaacctccctcccccacgctcattccttgcagtgtgggtggggctgagcccccaaactgtgtgtgtgtgtgtgtgtgtgttggaagtgtggggtaaggacgtgactcaggactggccaatcagcgtcttctatgctcctggatacagtggctggttcagtgatgagcccatggtccaacagcatccaattctggaatttctaatggaattatttagaaatggaagctctacggccgggcgcagtggctcaagcctgtaatctcagcactttgggaggccaagttgggcggatcacttgaggccaggagttcaaaaccagcctggccaacatgccgaaaccctatctttactaaaaatacaaaaattagcccggcatggtggcacacacttgtaatcacagctactcgggaggctgaggcacgagaatcgcttgaactcaggaggtcgaggttgcagttgagccaagatcgcatcatgcactccagccagggcgagagagtgagaccctgtctcaaaagaaagaaagaaatggaagctttagtccaagttgttgggtgtctgtttggaagccttagttactgggaatccccaacaagtggctgaagccagcgcaaaggatggcaaaagcaggagatggaatgggaaaggactctagatgacataatttgggctgctggatccagccacgcctgaagatgaatcctgattgttttcctcattgtgcccggctctgttcctgaatctccatctagaggcagaatttttggtgagatgtgtcagtgtcgtgtgcccttttctgatcaggccactcgagctgggatcctgtgtgcataagccggttactgagagctagaacctgcgtggggtgaggggcctgtcagggcaaccagcacacagctgggctcaccaactacaggagctggatacgtgggtgagaatgggagtcaggtagctccctgcaaaggcctgtcctcgggggtgagtttgggagaagacttcatgggaagtagctcatgattttccaattattaaacctagaaaaagaaccagcagaacattctctttgccttcatctttctgtctttccaatgggtaccttgacacgtccagggcactgagctgtggagaaccggttaattttgtcagatgtcagccttcctgacactggaatgtaagctcccgatggcagaactcctgcaaaaagtggctcactgctgtgtctgcggcttaggagagctctcggcactcagtgaatacttggtgaatgaggaaaaggcgtgatgctgtcactctctttctcgaaacactcaaatgccttcctattgcagctaaaatatataaaagctatactttttgctctgccctctaagtagagtgactgtgtcatttgttgaacaagcaggggcattttttttgcaggtcaaagggaatgctaccaattaggctggaacaatgggagcaagccagaattattccaggcaaagtgggatgcatgccttccccagatccaaggccccccgggatgctggtttctgtcccaggcgtcagcctcattttctgccctccgagtcacgggccacaccgaccctccatcagaacttcgcactgtctgtttctctatctggagaagtcctttgagtggctcagtcttttctggcacctcggtttccactgcacaccacctactcaaagaacctacccaaagaactcttttctgacacccatcctcacccaggcagcctctaccaataggctgtgtttcctgttcctcattgccctggactctatgcaggcaggcagggagtgagcactgaatttcagggcacagctcccaagcttctgtcatcctccgagtaggtgcttgtgtgcccagcacgtgtcttcaaagggaaagtgaagtgaagccagtgtcagcgcagaagtggggtggaaggggaggaaagacaaaggaaaggcaagaagaaatgaagcctgtggcagagaggccaagtcacggctctatgcacagcttcaaaaccagtgagtccactccagaaatcagatgcactttgacctcaatcactgcggcacctcttttttttgttttgttttgcactcttgtcgcccaggctggagtgcaatagagccatctcggctcactgcaacccctgcctccggagttcaagtgattctcccgccttagccccccaagaagctgggattccaagtgcctgccaccacacccggctaatttttgtatttttagtacagagggggtttcgccatgctgttcaggctggtcttgaactccaggactcaggtgatccaccctcctcggcctcccaaagtgctgggattacaggcatgagccaccacacccggcctggggcacctcttttaagatgtgtttggaagcggcatttgaatgcagattccccctgccccgccccatggctggaattcctgtagacacatgcaggaattgtgcagccacagaggccaccacatacgttcctcattttcccgatttcctctgtccttgctgctattggggctctgtaacattgtcccagctgtgtttgtcatttggctctggctttccatgcacacctgtgggtgtttgtttatagaatgcagacaccacccctttggctgccacgagggactggccctggggactggcctccaggatccccagacagatttgcttctctgccttctaatttttttttcttttcaagacaggatcttgctctgttgcccaggctcactgcaacctctgcctcctgggctgaaacaatcctccaacctcagcctcccaagtagctgggactacaggcatgcaccaccacgcccagctaatttttgtatttttagtagagacaggatttcaccatgttgcccaggctggtcttgaactcctcgcctcaagtgatccgcccacctcagcctcccaaagtgtggggattgcagaggtaagccaccgcacccggccttctctgccttctttaaagcaaaaggactggagtagcagggatccctcagggtcctggctgaaaccaaactcaaccctgatgattccaataaagatccctttatttaaccagggggccagtttatggaggtgtgagcaggggtaagggaatgaggatgggatgctgaggccccagaagctggccatggcaaccatcatcaccacctatcaggctgaaggggcgaggggaggaatcgatgctactggatcctcgtggagggcggagaacaggccacctgacaggggttgtagtcttgcgggtgcagatggggcatggacgcagaagagagcagagaagaaacaccgcagcctctctctccttcctccgtctgatttcctgctggtgccgcccattggccaaacccaacaggaagccagacggcctgggaggccctgagtgcggcccacacagagcagactccagggcccagggcaggatgtagaggggatgggggcagaaaaccagcacaggcgggtaaggcaaccgggaacaagtctatgctcagtcttggtgcaaatcctccttttctgtggctccatccacctctggccacagagcttcctcactgggctgacagaggtccttttgctggttacaacccatgctccacacaccagcagagtgatcttaataagcaaacctggcctggtacggtggctaaggccagtcatcccagcactgtgggaggctgaggggagtggatcgtttgagcccaggagtttgagaccagcttgggaagcacagcaagactccgtctctacaaaaaattaaaaagttagctgggtatggttggacatgcctgtagtctcagctacttgggaggctgaggcaagaggatagcctgggcatggaaggtcaaggctgcaatgagctatgatcacaccactgcactctagcctgggcaacagagtaagaccctgtctcaacaacaacaacaacaacaacaaacaaacagaaagcaaacctgtcctccatgttctgtatggctcctgttgctcttgggatattgactaaatctgaacccctgcgtgtgagagcctgtgtagtctgacccagctgaccctctgacctcgcctcttgtcctccacctcccttacgccccactccctgctctgtgcactgtggccacactggatatttttcaggacctaagaatgtcatgctccttctcaattctgagttttgtatatgctgttccctctgctgggattcttttgctccaaccccagctacttataaataccacttcagatcttcagatctcagcttaagaaaacacacccctaagagtgacttccctgagtctacaaagcaggtgaggactctgggcagacactctcaccacccctgaatttccttacttcacaatatgtgtcacaactgcaattagctaataaattgtgtcactctctgtttactgtctgtctccccagagaaactaggagctccccaagatcctggtctgtctgtctgtttcactgctgtgttcacagcatagtgcctggcacataggaggcactccaccaacacttgatgaatgaatgaaaggaggacttccagttcccagtacaggcacacttgattatttgggcttatcctcttgctgtaaacagctggattaaaaaaaattaaaatgtattaaaaggaaggaaggggaccaccaggccaaaattgaggagaaaaggaatccagacaggtgagcaagagaagaagccactttttccctgggacacattctgcaccccaaaaatgcaaatcttgttttgatagcttcatggaatgaaagagacagaaatcagactttggggctcatacaaggtggggcatataataggacacccatcccatgttgatgcagaacttcaaagggctacaccctcgggataaaggtgaaccagaagtaaaccagaagtaaaccagccctcatatgaacttccaatctaagttctcatctcctggatgggatagggaccactaaaccttaatagttgattaaggtgtccctggaatgtcagtattccttggtgtttggcaggagaaaatgaaaatgatctccagtggaaggcacctttgtcctaaatctttcttataaacgatttatcaaaacaatgaccagcacatagtcaaagataatcagacacacacacaagacactgtgagtaaaaattggaagaactgatacacagacttcaaattattgactataaagtaattgtgcctatgatgtttaaagaaataagacatgcttaaaaataactgcagaaatgggaatctataaaaagtgaaatatcagatctgcaaaagaatcaagtaggatctctagaaatgaaaactacaataaccaagaccaagaacatcaatggacaggtttaacagattaaacacagctgagaagagaattagtaaactagaaaggatgtcagaagaaattatcacaattgtagtacataaagacaaaaagaaaatacaaaagagaagatatgagataaagaataagacctaatatatttcatattgtccttgaaggtgaggagagaggaaatggagtggagccattgttttaaggatgaatatgggtaaacattttctggaactgatacatgactgtgtgagaagaaaaactgagtcattgtgccttggtgacaatcaatccatctcccatgtttcagacaacctagaattcaaaacatactaatgggagattctggacctagtctactcttggtcaaaggccacagtgttgtacaataccaagtaaaatatagcaaatgacacatgaaaacaagatcaggagtgagaaatcaactcttgcctgtctcctgcctctgtggttcacccctgccttcttaggaactatttgggccactctgagatgaccacagctgtgtcctcctgttccttcttccctcccatgggccttgctgaccagcactaggagatagcaagacaacattccacaggcaactgggggtccagtggcatgagtgggtgggtgaggaatgcctctctcccaccctgattcagtgctgatgctgatatcttcctcctagacactgttcctcttctgtccaccgacctttgtctccccattctgtgcctgggcccttaagggtgcttggtggagactcattcactagctgactgatatgaattggtccaaaggagctttgtccctcgcttcccagcacaccagcatcacctgggacctggctgtcaaagacctaggagctgggctccaggggcaggcagggtattacccaaccctgggtcctaccatcctctacctcccagccttgtgctttcttggacaggcgagtgatctggctggcaggtgggtagcttgtttgtgactcacgctccccaccttggtggccaggtggcctggtccctggcctcctcatggtgactcgtcctggaatcaggttcctgcagttgctctgttctggagggacaccattcatcatcttgcctctgggaatctcggcacgcctctcagacatgctcaaacagagaggctgccaaacctgtgccgggtcacacagcaggtgtgtgatgaggccagggcgcacacacagtcccacacccccagtgggcgggaaggcaggcccagcccttgtgtaaccagcgtcagggcctgggcactgtgagcagcttcatggtggagctcagggaggccctggtcccacccttgtcctcaggcatgtgccagattcccccacccccagcagcaggtccctccaggcccctgtgctgggcaggacaccagtcccagggcaaaagcagagaggggtggccaagtggtggttgatctctcagcccctaatgagcaaagcctggggtgtcatgtggtctcccagatctggctctgcaatgtctcagacatgccgttcgattttgaaattctcaaagatgttccaaacagcatgcagttgatttaattttttaaattgaaaactaaaggaaattgagttgaagaatgttgagtggaggcagtggcgggaggtgtgatggaattgagccaatcatgagggcattggggaaacaggagcatttcactcccctgggtggatttgggggtacagagggttaaactaccccactggatggggagtctaggagctcaggtgccgctcctgcctgtgttccagccctggtcttatcactgcttccggtgagaagggtccctgaggggcctaggctctatggcactgggcacctggctggggcatctcctaggatgcctggctcctgggtgagcggctgggaccctgaggagtctgatgcttcccagggaggcagaggaacccagagcaggctgctgtccctccagcgtggctcacgcaccgcccccaggcagcgctgccccatatagcaacatcactgcctcactcaagatgctcacctcacctctgacacatttcaggcttggagccatcgtccccacctcccctcggctcaggggcctggcctgtgactcatgcctccacctctcccagacaagattgctccttgaacaaaggagcacaggccttggtgaacttgggaattgcacttgaggggaccctgagcccctgggtctgacccctccagccctgcatcggccttgagatcacatgcaggtggcacgtggctgcacccgcaccagcacccccacatcgcccctctccccggttgctctgggagtcacccacaccccagcctctcctctgtcctttctgctgccctgcaccgagcccagctgatctgcagggtgaagaagccaatgatttaaggcctcccagcccctcttcataattgtggccctcctttgccttggcaagtggaatccaacagcttcctgtgcttgaacagggagacgaaggggcccaagagctgcctgccttccttgcctgaggagtttgcttattaacttgaattaccctcgtggtagcattcctggcagggcagggaagagcagggttggtttctagaaccttttcctgttggcggccccggcgctagggaagcttggctgaggcctcctcctacctgccttcttgcccctcctccaggacaccccaggaccccagaagcttccctggttgttggaagccctgcctgggtggctctcctgcagggctcacgctgacctcctgggcccgagctgggttgggcaaatggaaaccagctgtgatgccaagtgctgagatgacacagttgagaagtgagggggcaagggagcaggatgtgtcccccacccctgacacacacagcacatgtctctggctcccttctcaccagcaaggggaaggcaggacccccaccctcacccctttacttgctgaggtcacagccttccaaacagaagttaactgggaggcccttggggccgaggactctctcagtacctggggaggctgccaccccagtgagaatacttgttctctcttgaactccccatgggtcgtcacctgggattctgcacttgtatgaaggacattaaaacaaatcttgtagagatgggggtctggctatgctgcccagtcttatctcaaactcctggcttcaagccatcctcccacttcggcctcccaaagcgctgggattacaggcatgagccactgcgcctggcccacgaagagcattttacttcgacaagcacacggggcacctgtgcctgctcatctgagtgtcgtacaggctttgaccactgtgcttagccttcaaagtcactggcaagggggctctgcccccagaatgagctcattaagtgttttctaagcaaatgaaaggcatcctttgtgggggggagggggtgtggaaatctaagcaacattaaaatgacttcagttgtttggttatttggaacaagcattttgccctaaattcttaagaaggctgtctccttccactgcgtttttcagggaccaaggtgtgccctagcctcccactctgccttctgccccagcacgtgggaatcattagctggagccaagtgtctcataagctttccctgtttatctttcacaactccatgacatgctacttgttttgcatacattttgcataaaaggaaactgaagctcggagaaactgacagactcagtgcggggccacccagtcagcaggaggcaaggccaggatttggtttgatgccaggatggcacggccctcttcccatgggccatcctcatcacgggatgggagaaacgggaaacgcctccttgtcacccgtgaacaaactgctttgctccagaaaccgactcagcacacacctcgagtgtgcactctgtcagggtgcccgggcttcacttacgtgtccggtacgagactgaaggcccactgtgagccagggttctgtagccttcagctccatgcccagtggtcctggctccaggcaagtagcacttgtgatgctgaatgaggcatatatttcagcatgacagaccacagtgccttcagattgttccgggataaatcctttgtcctgtggcctcctgggctaaggccaattaaacagctgccaggtagggcttattccctataaatcagtgggaatgtggccacatgaattttaaatatcagattaaaatcaaattagtgggaaaatttggaacaaattgccttcaagtacagtgaatgagtctatttttaaaacactgccgcaccaggcaaaagagtgaagcaaacacacatttcctaacagcgagtagacaccgtgctgggagtgatctgtcatgcttagtcacggtaattgctctagcaaaactcaggaatcaaataaaacgtgtttgcaaattgtaaatcgctccaggaggctacttcagacgggtcctaacctgatgctgaaggtcacggcggctccctttggagcagacacccagccctgacgcccccttgacccatccccaccccctttctctgagcaggggttgagccggctgagaccattgcccaacatgtgcacgggaaaggccgctgtaaatcagccacatttccgcatctgcgggagggcatggcattcttggggggtgctggggagggtgctctggttggctggagggaggtgagggagtctccgaggccaccatggccgaggcagagaagaaatggcggcggtggctcagggaagagaggctgtgtttctggtgaaaggttgggctgccatttggctgaagaaaagatcttcagatccaagagggcttgggacaggcggtgagggctccctcaagccccgtccgggtccctgtgtgacatgccctggctctaggccaccacatttggtccctagcctccccaccctcaggctgtagtccctcaataacaaccttgccagtcgtcctagagtggagataagaggagagacatgaagccttgaaatagcttttaaagcagaaatgtggccgttctcgttcccccgtgctcacctgcggctcctgcagcttgggggcagacagggctgcttctcccctaccctgtcctctcttttggaaatcttacctcctccccgcacagtctcctgcagagcatgactgtctctctggggcctggccagacctctgattctggtgataaactaatcacatgaaggcagggaagattatctaggaccggatgggttacctttcttaggattcttgaatgttaaaagtaacttcaggggccgggtgctgtggctcatgcctgtaatcccagtgctttgggaagccgaagagagagggtcgcttgagcccaggagttccagaccagcctgggcaacaaagtgaaatcccttctctacaaaaatatttgaaaattagcctggtgtagtggaatgtgcctatagtcccagctacttgacctcttgagtccaggaggtggaggttgtactcccgcctgggcaacagagagagaccctgactcaaaagaacaaaacaggccagtcatggtggctcacgcctgtaatcccaacactctgggaggcccaggagggtggatcacctgaagtcaggggttcgagaccagcctggccaacatggtgaaacccctgtctctactaaaaatacaaaaagtacctgggtgtggtggtgtgtgcctgtaatcccagctactcaggaggccaaggcaggagaatcacttgaacccgggaggtggaggttgcagtgagctgagaatgcaccattgcattccagcccgggcgacaagagtgaaatcccatctcaaaaaaaaaaaaaaaaaagccaggcgtgttggctcacacctgtaatcccagcacttttggaggccaaggtaggcgaatcactagaggtcaggagttcgaggccagcctagccaacatggtgaaaccccatcgctactaaaaatataaaaaaaaaaatttagccaggcttggtggtgcatgcttgtaatctcagctacttaggaggctgaggcaggagaatcacttgaatctgggaagcagaggttgcagtgagctgaaattgcgccactgcactccagcctgggcaacagagtgagactttgtcaaacaaaaccaaacaacaaagtaactgtagaagctgcaactcagtgggccaccacgggggagccttatttactgtgctcttgcgttgcctctgacaatggtgcggcttgcttggcggaccttgggccaacccaatggacccttggatagaaaggagagggtgaggatgtcttgtaaagaaggagagagatccttgcattcaaacacgtatgttcaagatctgcatagccagacactgaaaatctgctgcggccaagttcagtaggaggccaagacaggcaggaaggaccccaggagtggtcatttgatttggctttaggggctggtgtgaccttgaggagaagagtttccagggaggataaaggtggaggatgaggatgaggggacagtgaggatgagtgtcagaaaatggctctctggctatgtgacaaccacaaaggatgtttcttaaacaagctagtttcccaccccagcttgatggctgcaggagaactacgtctttaagtcgggtgagcctgcagacaagtctgaaaaacggggctgctatagaagagtctcacttcttggctctgcctagaaaaggctttgaattcgtagaggattctttgcctgtcgccctggtccagcctcttctgggcccctcgaggtagctgggcagtgtgaaccctgtgccccgctgccccagaaatcatgctggcttttgagagctcagctggtcttgctcaaagtgtctaccactttgcattctgttttttcttatttttgagacagggtcttgctctgttgtccaggctggagtacagtggtgtgatctacagcctccaactcctaggctcaaacgatcctcccacctcagcctcccgagtagctgagactacaagcatgtgacaccacacttggataatgtttttggagacaaagggtctcactatgttgcccagactgttcttgaactcctgggctcaagcaatcctcccacctcagtctctcaaagtgctggaattacaggtatgaaccactgcacccagcctttgcattctaaggggagtttctggacttcaggcctactggagttccccaacactgtcttctgctattgtcaagcacaggcagcggatgtgggcacagcaaatggagagaaagggtgtctatgccagccaaacccggagaggcctgttcctagtgggtggggccagaaggctagaaaaatataaataaaaacaaaccgaagggaagcaaagctcttgggtgccagaacggggctggccagggctgcagctgtctgagtaatgggttccacatttgtctggcttggtctgcagccaccaggatccagggtgcactgtgggccttgcaagggctggaggggacagtgcagctgcagctggacctagcatacccttacggcggccccatccccggccgccacaacagggtggagatgtcgctgcgagcttccacttcggcaccccagcttccctcccctcacagccccacccctgcctggggctcctgggttcccccggccaacacagattgttcgtgttattaatgccgttttcccagagattccatctggctttttaattgctctgggatggggctaggatgctttgatagtgaatcggtatcttccctgggcctcagcttacgtcaaacactccatcggcagagaggggcgtgggggagggggagaggtggggttgtccagagagaagagatagcaagagtctttcacagaatcaagaaagctttcaaaggtgctagtgggttagttttatctaaagaaaggaaaaagaggcctggcagggtggctcacgcttgtaatcccagcactttgggaggctgaggagggaagatcacttgaggccggcaattctgaaccagcctgggaaacacagtgagacccccacctctacgaaaaataaaattaatcccagcagctacttaaaggctgagtaggaggctgaggcacgaggattgtatgagttcaggagtttgaggttgtgggagtggtgactgcaccactgtacaccatcctgggtgacaaagtgagaccctgtctctaaaaaaagaaaagaacagaaaagccttcccgtcctcactagtataggaaagaaacagctggaatatcaacaccatctaggcaaggactctgccccatgcctggagaaggcctgtgggtgccttggaggcccctcttggctaaacaaagtcaggggtttctgctatcccttgtccttccccatgagtggccccttcccctcctgtgagaccagcagctcctggaggaggcctggcaggttcctgcctgggaaggagcaggtgggagagctgggaggggcagacactcctcaccaggcccagtggctcatcgcaggtgtcagggccaaaccccacgttcacagattcccaggagatccaggagataacagtaatatccgtgacagcactaagccatcaggacgcatctggcagcagaggagatgcctccctcccttctacccttgccctttccttgaaggccagctaaccctgaacagcgctgtcacgggacacagggctcaggagtggcgcagcaaggggggcgaggtccctgcagtcaggtgctacatgtcaaggggagatcgatcagggcaaaggagaagcatccaggcatcttgggactggggccagcaggaggccaccctccccaggtatttcatcaaagctgctgcctccataaagccctccctggtggaccctgttcacactctgagatccccttcattgcacttggcaaccttaaaccacagcttagggcctcaagggtgtgagctccccaagagccagagcagagtcggcttgttcccagcccagtgccccatctttggcgcaggccctggcatacagtaggcatctgataaatacttgaggtgtgttcagtgctgggctcttggaatggttcttcctgaaggctgtagtcaggaggggaactgtgaggaaccctgcaggaagcggtgggtggccaagggtgactctgttcccgggaagcccctacagctggacacggggtacatgctgggcaggttcaccccatgccgcccaaaagaccttcctcccctctactttggccccccccgggggcctcgccctcctcatccctttcctggggctggatgtgattggatccttcttgtccctaacaaagcccaccctggaactcaggaccaggaggaggactcggggtaggagggatcccttccgggagccatcagctttaaaagaggaagcccctagcgggctggcacagcagagaggaggggaaggagtgagggcaggagggtcgccccaccccctcccgtcctaggacctgttctggggggaaagggggaagccagggatcagccccctcaaacaagaaaaactggaattagcactgaactcagagggtttgctggggcttagcaagctgcgacctgccccaggcctcggggcacgcggcggggctctgcctcctctgttcccagggtggcggggcaggcgccgcctcctcactgggctcgtggcctctcctctgccaagggcggccgtgggtgaggaggcggccagacacaggacagagtggggggccggaaggggtgccagctaaccacgcaggcaggtaaagctaagcttccagagtgtaaaaggaatgtgtaatttctcgaaaatgccccagcccgcattggtacacacagtaagccactcagtgaacattctctcggtacagagttaaaaaaaaaagaaaagtgcaatttatcttttaccctccgtgagggtaaaatctgaaaagcaccatcagcctcctgggcctctttctcccgggccttgttagttcagggataagggctgccctcccttgcttggctgtcactgctgctaagggggtgccggagtgcctgaccttacagggtgctcattggagttgggggcacaccagcactcagtcccctgctgggtctgggatgaatgcagtggggagtgtggatgctgggtgggttcttgaacagccagtgtgtggggcaggaccagacccctgttgcaggcctgcctcagccccctttcttgtgagggctggggctgggcaggtgtggagggctggatggaggggtctctctcttcaggctgccttcgggcctcgcaggggtagggtgtagccacatggtctagggaaagaggagagggttggagggtcctaccactggaggcctcttcctgctggccgagggtcctgctggaatctggagctgcggtgtgtgtgagtggccagggctgcagctgtaggtgatttgcaaggaagtctgcacaaagggctccttgagcctagggctgcttagccaggcctacccctcaggcagaggactccctctcctcctccccggggcagataagaagcctcgccaaggcctcagcccagtaaccccttcagccccctcccctgaccccaagagactgccttcaggctctggacatactccatttggagccttgtcctctgctatttatttgtcttgcctgggggaagtaagtcacccccttagggtaagaggggctcaggatggatggagagctcatgaaagtcaggattgccgccagggaaaatgctgtattatttacaaatgtgacctggcccacagacaaccttggaagtagcttctttctggttttaaaaagacaccgacattgactttgatatgtttatattatagatataatacataaaacatctagagtgagactctacgttctccccaaaagaagagaaccaagccgtccttccctgctcccagccccagtgatgcgttggcgggaggccacctcccttcccgaccaggagccagggcctctgggggacaagccttgtgggcagcccaggccggaggggctggggaaagctgagggcaaaggagaacccccctcacctcattggtcccccaggatcaaaagtaatcccaaaaccaaaaggaaagggagtctcagacccttcccccagctgccgacggagagtctcattttggcaagtatccgagcaaaaccaaaacaaaacaaaaaccaaataaaatggtggtttagcagagacgcgcacattcacattgcacaaggcactgctggggcacagaggccagatacaagtgttgatatcggctgataaagcaaaatatttggaaagcttgtcataactccggtccctctgggatggactgatcgtgcttcgtgttcctaggcaatgctgaaggcatacagtacaaacaaggctgagggtcccagtggcccttcaccccccatgcccgccccacagccagatctctaggtctccctctcccaccaggggtatacatcctcagagctgacccacgacctagctttctggtgtgactcggggtgggggctcccactggtcacctggtgacccccatcgcagtgagttccgccccaaggggaagcccagcctatagcaggctggggtggggtgtgtgcggagggaggtgggagaggcgtggaactagagaccctccaccttcatgtagaactaggggaacaaccttaggttccaagccccaagtccctatgtttccacccctttctaaggacaggcgtggaggagcggctggggctggcgggcttgtcgggatctcagctccctgagccctcctcctgccacgggcctgctcccctccttctctcatgggggtctgctgtagcctcgggaaggaggcaggaaacctccaaataaaatgacaaggcacgatttgctccccctactcagtaggcattggagcggtgagtttgcatttccaaggcacaaggttatcctaaatactagagttgccgggctcccagctcagccccaagaattctcccctcctcgcagggagaagccaccgcctggccccctcatcttagacgcaccaagtccggcgcagaggaagggaggggacacgcggagcaggccaggctttcaggaggcaccggaatctcctagtcctggctcgcacggctcgggcaagcctcgagatccggcgaccccaaaccactccctgggtccccgccggaggctggcccagggcggtcccacagccgcgcgcctcacgcgcagttgcccatggccttgaccaaggagctctctggcagctggcggaagatgccccgcagcgtgtccagttcgcggctcagctgttccacccgcttgcgcaggcggtcattgtcactggtcagctccagcaccttctgctgcgtctccacgttgcgctgcttggccttgtcgcggctcttgcgcaccgcgatgttgttgcgctcgcgccgcacccggtactcgttgctgttcttgtccaccgacttcttggccttgcccgcgccgctgccgccactcgcgcggaggtcggggtgcgcggcgcccagccccttgagcgcgctgccagggcccggcaggccggcggcaccgagcgcgggcgcggggtgcgggctgggcacgggcgtgggcggcggcgtggggtgaccgggctgcaggtgcatggtggtctggccgcagtgcgcgatctggaactgcaggtgcggggcggccaggtgcgcgggcggcgggtgcgggtgcgggtgcgagggcggcggcggcggcggcggctggtaagggaagaggccggccagcgccagctgcttggcttcatcctcctcgcggggctcctgcttgatcaccagcggccgcagcgccggcgccccgacgcgctcgtacaggggctccagcctgccgtccaggtagccggcggccgcgcagccgtagccgggcgggggcccgtgcgctcccccgggcatgacggcgccgccggggcccgcgggcgcgcccgggtagtcaaagtcgccgccgccgccgccgcccgtggggcccacggccgccttggccttctcctgctgccggctgtgctggaacaggtcggccaggaactcgtcgttgaaggcggccgggtcgatgtaggcgctgatgtcgatggacgtctcgtgctcgcagatgccgcccagcggctccggggcggcaggtggggcgggaggctgcgcggggcccgcgccccggggaaagccgaaggcggcgctgctgggcgcgtgcggggggctctgcaggtggctgctcatcgggggccgcggctccgcctcgtagaagtcggccgactccatgggggagttagagttctcccggcatggcgagcctcggcggcctccagcctgcgcggggcgtcgccgccgcccacccggagaccctgctcgcccgcgcccgcgcacctccgggtcgcgaatggcccggcccgcgccggcccagcttttatacccggcaggccgcgtcgccccctagagtccgaggcggcctctgtccccgggctgcggcggcgcggcgcctgctgggtcctagcgcgcggccggcatggggcggcgaaccagcgcggcacagcgccgcgctccccaggcaggccgcggcgcaacgcccaccgcctccagcgcgcccagcagagccgcggcgctcgctccaagctccgcccccggcccggccgtcgcccccgcgcccacgtggtcggtagcgggggccccctcctcctgcctgccctaggcgcccgtatccagccacggccgggagcccaggagtatcccgaggctgcacggggtaggggtggggggcggagggcgagtcttggtcttgagctgctggggcgcggattctctttcaaagccagaaccaggcctgtcccggacccgcgtcccggggaggctgcagcgcagagcagcggggctggggccggtggggggccgtttgggacgcgcggagaggtcctgagcgcggtggctctgcgtctcctagctctgatctccaggctacccctgtgattccgcgcagaggtacctctcggaggacgccggggtcccatgggcggcgccgcgcagggcgctaggaccccgcggggagcggaggcggcctcggcccgggagcctggaggacctggccggtcgatccgcccgggctggaaaactttctttataattacttctccaggtcggagcgcgcggcttgctaggcgcgcggggccggcgctgttacccggcgtggagtcgccgattttttttcctgcgggaccgcggggccccccagactagcggagctggacgccggggcgagcacggggaggggcgcaccgagggaggagacaaacttaactctggggccgggattccgaggcgggggccgcagccctcgaggcccgaagccaccgcttcctcccccgcctccccattcaggtgggcgccaacggcgggagcgagggtgtccaggccgccgggctgccaggtccgagcacgcacagggagaactctgcccagtggttcgccgggcgctgtagtccccgggatcctagggaccgaggcggccaggccctggggccccttgagtgcggcagctaatgctctcaccgcggcgggggaaggagcttgccaccgagacccccagccacgtgcgtccctcgcattctttaccggggccggggtggcggctacggaccgtcagctgggcccagatggagtcttgggagccctcaagtgtctcctgtccttgcccgcgccgcccctcgccactggcgctgaggcctgacgccgcctgcgtcccggctagaggcgcgcttgcctacaggtgagggaagacccccttcaccgacagtggccttaggcctggcaaggcgccacgacccgcccaggagccccggagggggcacagctaaaaacaccgctggagagccccgagcttccacgacgatcgcagtaaagaagcagtttcatctgggcaacgcacactgcgctttaatcaagttcctattcaacatagtcccagtgattaatagcccaactgcttcgttttcggtccagagctcataaacaagatatttttagcttgacgcttttggacgggagggagtaaaaaccagatacgttaaataaatatcccgatgtgagccggagagctgcttgctgagccaaatgcaggacccattcatatagcattcacctgtggagggagacctggacggaaatcaaaaagcaccaagagcgatttgcgtttttttctgcggtgctaaaactaatggcttttcctacctaggaacaaagaaacgccactgtacatgcacggttcccggcctgtggagttgtgggaggaaggcgatgtctggccttttttgcacagctgctgttgcctgcccagagatcgggaactctgccccgtaggactggaagaaacctcagtaatgggaataagactttgtccaatagggggctgatgaatgtgtgggggcgacaatggcaaggagtgggactcccggcccggggttcgccaaccccaggggccacaggtcctcctacaattgaaccagaattcacccacccgggcctgccctgtgcagggtgccgagagcccagggatgcatgagagggtggctcctgcctctgggaactgggacagtgggagagacggataagttgtcacacagaggctgctgggaggaaggaggagacagaaggagtaggggatgggacttcattcattcatcaaatgcacacgaggcacaaatgggaatcaagggtggatgtgctgtgatgaagagaagtcctgccctgaacaaggtggcgctgtggaggaggcagagatcagatttgtctgcggaggtgttatggactgaactgtgtccctgccccaaattcctatgttgaaggcctaacccccatgtgactgtatttggagataaggcttttaggaagtcattaaagtgagatgatgtcatatgggtagggtcctaatttgataggattggtggccttatcagaagaacaatgtcatgggcatgcacagaaaggaggtggccgtctgcaagcagggaagaggcccctcaccagaacctgagggtgctggcagcttggctttggccttgggcatccagcctccagaaccatgagaaataaatgtttatggtaggtctatgatggcagcctgcttggactgaaccggcggtgagacagggcttcatgcaggagcagacctttgagctgggccttgaaagttgagcaggaatttgctggaaggataagggaggaaggctcttctaggaggagggaatggtaagtgcaaaggtggagagcctgccagtgcatgtgttctggtaacaaagaacgagatggttggccggctggagagtggggtgagggagggtggggcctagataaggctggatccgcagacagggctgggctgatggccaaggccactgcaggtgaagggggaacccttatctcccaggcttttgacctccagattttagcaggggagcttcgttgtcggatttgggttcctgagaatctactctggccaagacggagagggggtgttgaccagatgggaaaggatggagacttgtattgccccagtaatgagcgggcagggtagattagaacaagatgtcaggacttgggggctgaatgccaggcttctggctgggattaccaccccctgacacatataatgcccaggaaattggaggcccctctccaagcccccaggaggccactggggactcattccaggatactcacctgcctgctttgtggttttggaggggaagaccttggagcagttgcgaagatccatctaccatgttctggtttttccttggaagcctaaaagtgtacctcgggatgaggaggaaatggttttgagggcaagtggtaggtctctggctaggcctggcggggttctcagaggacagggggtgtctagggccctagatagaagtgtcctgcccaagccctaaagcaggaaattagctggggagttggggtgagaccctggggtcgatggaggcactttccatgggagagtcccacagggtaagggagagggggctgatgtctgacagtctcatagacagttggcttgtggctggagaagtgggagcaaaggagaaatcacctttgattgggagaagtggctctggctcatgtgcaactgagacaaagccagtcctaagagcagcttgtaaattcttctgtgaccacctttaaggtccttcttcctgaggctgtggatgggggtgtacacaggcccagtgtggggggttgagcgtgagtccccgggaaacggtggtcctgagttttggatgctccaggatgaagcctgattctggagtcaatcacagcactaaccattttgagaagacaaacagagccctagaaatgttttattttactttggtttaaccttcctaatgcaaggcccacgagagaattagtacgtaagtttggaaatcaatcaaattctgaagagcaaaaacggaactaacccttctgatgtagttttctgactttatctgaagctgaaatgtgtgtgtaagattggtcgctccaaacaggaccaattcagataagataaaagtccagaactatgatttcaggctcagctgagctctggctaggggtacaagtatctaatatggtatagctaataatgtctcaatcattcaataagatactctcaaaggccttcctccaactagacaaacaaaacaaaataaaaacactagttactttttgttacaaatggattcataaacggttttatactgattcattttaggctttagatcttgacatgtaaagcatatgaactcaacgcataatcaacccaaagtccagtgtttctttttctttcttcttttttttttcgagacagggtctcactctgttgcccaggctggagagcagtggttggatctcagctcaatgcaacctccgcctcccaggctcaagtgatcctcccacatcggcctcctgggtagctgggactacaggcatgcaccaccatgcctggctaattttttgtatagatggggtttcaccacgcagcccaggctggtctcgaactcctgagctcaagtgatcctcccacctcggctttccaaagtgctgggatttacaggtgtaagccactgtgtccggcctagtgttttttatccacaggcgcccagctctacccatgagattacttatcctgtctccccaggaggcaggtggtgtagggagctgctgggaggattagggagaatgttgtgccaaggccagttcctggcatgcaggacacacttgctcagtaaataagagcttggcatacgcttccctactctccttgtctctccataagtgcacttttgaggttctagtttcccccaaaactttgaatattaagcaactcatttctttttttctttttcttttcttttcccttccttccttccttccttccctccctcccttctttcttttctttctctctctctctctctttctttctttcttttctttctttctttccttccttccttccttccttcttttttttctttctgacatggggtcttgctgtgtcacccaggctacagtacagtcatgcaatctcagatcactgcaacctctgtctcccaggttcaagcgattctccaacctcagcctctggagtagctgggactacaggcatgcaccaccatgctcggctaacttttgtatttttcgtagagacagggtttcaccatgttggccaggctggtctcaaactcctgacctcaggtgatctgcctgcctcggcctcccaaaatgctgggattacaggtgtgagccaccacaccaggcctaagcaactcatttcaacacatagttatggaatattctggcagtgtattaggctgaggttctctgtgtgttctgcggaaaagtacctagaaggcatggtactctatgcagaacgttccaaggcataacaaattctgtcttcataaggtagagatcatttaaccattaggaagtgtaactatattgtatgtataccacataaaatcacaaccataagtactcaagtctataacgagtccatactgtcaaattcacaaaaatcagctgtttccagttttctctctctctctctctgtcctgtctttttttatttttttttgagatggactcttcctctgtcacccaggctggagtgcagtggcatgatctcggctcactgcaacctctgcctccccggttcaagcaattctcctgcctcagcctttcaagtagctgagattacaggtgagtgccaccatgcctggctaatttttgtatttttagtagagacggggtttcaccatgttggccaggctggtcttgaactcctgacctcaggtgattcaccagcctcagcctcccaaagtgctgggattacaggcgtgagccaccgtgcccaacctccagttttttcttaatattcatctactataccatgtgtgtgatttcttttgtcatttttcatgtttataatatagttaggctttgtgtccctgcccaaatgtcatcttgaattataatccctgtattccccacaatccccatgtgtcaagggagagaccaggtagaggtaattgattcatgggggcagtttccccccaacgttgttctcatgatagtgagttctcatgagatctcatggtttcataaggggctcttccctcttctctcggcacttctccttcctgccgccttgtgaagaaggtgcctttcttccccttcatcttctgccatgattgtaagtttcctgaggcctccccagccatgctgaactgtgagtcaattaaacctcttttcttaaattacccagtctcaggcagttctttacagcagtatgagaaaggactaatacagtttgttgattttatttgcttgcaactgctagcaggtaagcagtagctggcaccaaacattctagaaaaagaaaattgagtcaaaatttaaaaatcagggctgggcacactagttcatgcctgtaatggcagcactttgggaggccaaagtgggaggatgtctggaggccaggaatttgagaccagcccgagcaacatagtgagaccccgtctataaaaaaaatgaaaaaaattagcgggcatggtgatgtgagcctgtagtcccagctactcgggaggctgaggcaggagaattgcttgaaccttggcgtttgaggctgaggtgagctatgatggcaccactgcactccatcctgggtgataaagcaagatcctgtctctaagaaaataattaaaaaaaaaataaacattcagaaaattctatctagtaattttgttgagcaaattgggaaaagcccttcattctattttggtggaaaacttctttggtaaatgatgggtccccaaactctgcatctagcatttggggagcactgcagaaggcaagcattggatgtggcaggtcgcccatgcttctgtgagatccgagacaagagtacaaatggcagcccccatagcatctgtttaaatatgaaaagttaccaatcaaactgagaaaccgttagagaaaatatgttctaccttcttgtcttaacacatacatctttatcatgtcctagaagaccggatagaatctggtttgggaacatggtggtgtggggatacccagccataccaattctcttcccatcccatcctctattccattccccgccagaaaggtcctgagtcaggggtgtggattcccaacacagggcacaaatgccgcctgtgccccttgaaaaatgccacaccttcttccttcccacatcctggggcttgggggcctggtgaagaggaccacgcaggtccaggcagctggccctgggctgctagggcaggaaactccttcgcccgtgggcaggagcagccagagcgggactagcgggcgccctctcctgtgagggtccagcacaggggccctcctgcctgagtctaagggtgggactaggccggcactcacagggcaagcaggagagcagggaccccactggtcctcgccttgtctgggggcccctggccctgcttctgtaggaggacacgacagttggcaataattccacacctgtgtccccagttcttcccttccctccacctcaccattcacatcctgcttcttcccttccctccacctcaccatgcacatcctgcttccagccccggggctttctcacctggaccactgcaccagcctctgactggcctccctgtggctttccctgctgccatgccccccactctctccacaaagtagcccgagttatcccttaaacatgcactcagcctgtaatcccagtgctttgggaggctgaggtaggaggatcactcggggccacgagttggagaccagccttggcaacatagcaagacctccctctctacaaaaaaaagtttttttaaaaaaacaaagtgaaacatgcactcagatcacaccactcaccaacttaaaccctcctgtcaccacccattgcgcatgggagaaaacccgtgtacatccagctggccacagaccctgcctaaattggcactcgtctctgctcatgccccatccgctccttgactccctagctggctttgccaagcagagcgtctcccagccgcaaggtgctgcgctttgcacttttggttccctggaatgctcttcccaggttggcacgactccttccttcctgtcatttgagaaggggctctcaggttcctcgcagggacctgctgcacactcgtcacccctcccccattgttccgtaggccactgtgtgttttattttcctcatagcaccctctaaaaatggtattttatgtgttccttatcagcttctccccactagagtgccaactccacaaacgcaggaaccttgtctgtcctgttctgcccattcccagagctagggccagcctcagcctatgcgagagcctcaaatatttgttgaacgaacacagatggatttgactgcagaaaactgctaccccgccaccctcctggaactgagtctgttcctaagcctagagttgttcaagggtggccctgaaggatgctggagaagacccgactgacccccgggtcagggatcactacatctgactcagtccggagcttcctgaagcagtttcaggcaaggctgccagggcctggaggacctgctcagtgcctttagggtaactccaaagaggccactgacaggcagttatggcccccaggggcttggctaagcaagaagaacctttgtagggaggaaaatggggccttttttcggggtagctgcagtccagccaggacacaaggctttgtgagcagaggtcacctgagttgggccctacctgaagcgccccctccaccatggctccagagctccccctacctgtagggcactgccaggaggggcgcccagggaagcatggacatggctgagtatcagacccacctagggaaatgggcctgtctcccagctggctcataggggccacagggactgctctatcctgccgacttggcaggccccactgctccagagatagggtggagtccttggagcccattcttgtgcacccaccgttctgaccccatttcttctctttgctgaattccaaggatttgtgcctcaagaggcatcttttaaaaaaattttagcttgatgcctcagctcacacctgtaatctcagcactttgggaggccaaggtgagaggatctcttgaggccagagtttgagactagcctgggcaacatagtgaaacttcgtctctacgaaaaattttaaaaattaactaggtggggccaggcgcggtggctcaagcctgtaatcccagcactttggaaggctgaggtgggcagatcacctgaggtcaggagtttgagaccagcctggctaacatggtgaaatcctatctttactaaaaatacaaaaattagccaggtgtggtggcgggcacctgtaatcccagctactcaggaggctgaggcaggagattcgcttgaacccgggaggtggaggttgcagtgagctgagatggcgccactgcactctggcctgggtaacagagtgagacactgtctaaaaaaaaaaaattagccaggtgtgacggtgcatgcctgtagtcccagctactcaggaggctaagacagaggattatctgagcccaggaagtcgcggttacagtgagctatgattgtgccactgcactctaacttgggtgacagagcaagactttgtctctaaaattaaaaaaaaaaaatcctaataaggtgagaagccaaatcttttgaaaaatcaaaataagagtgtctaggggctgactgcatgacagccccagttccagccttttttccttgtgattctactcagctgcctcaagtctaagcccctcaacactgtgtaaagtagccccaaagtgcagacaatgaagctacgggaggaacgagctgcacacagtgggctacttggaacatttccaaaggctgcatctgctctagcacagtagttggaactcgatttttcccaaaggaagctagtatcaggtcctgctgtggcctgtggaaacacactgtcaacttacaggttaagaaaccgaattttagagtgtaaattagttcaaccgttgaactaatggttcacattgaaagcagtgtggcaattcctcaaagagttaaaagcagaactaccatttggaccagcaatcccgttactaagtatatacccagaggaattaaagcattctatcataaagacacatgcatgcgaatgttcactgcagcactattcacaatagcaaagacatggaatcaacctaaatgcccatcaatgacaggctggataaacaaaatgtggtacgtatataccgtggaatactatgcagccatgaaaaagaatgagattctgtcttttacaggggctgttatccttagcaaactaacacaaggacagaaaaccatgttctcacttataaatgggagctaaatgatgagaactcatgagcacaaagaagggaacatcagaaactggggtttacttgaaggtggggggtgggaggagggagaggaacagaaaatataagctttgggtactgggcttaataccgggtgatgaaatatctggacaccaaacccctgtgacacgagtttacctatgtaacaaaccacatgtacccctgaactgaaaataaaagattaaaaaaaaaaaaaaaagaaaccgaattgcaaaggttaccattcttgacatccaagataaaaccttaactgaaacaaagcaagctgcagaatagcttgcagcttccacttttctggggggaaaaataaacctctttaaatatacatttgttaggtgtatagaaagaagttaggaggacttcacatcaaactgttaatggtgggttctcactttgtgggaagggggataatttgcactttttaatttatatactcttgtattttggactttttaaagagatgagtatatatttattaattttatagtttttaaattataaaaatatgttgtcacttcaattttatagttttataaactgtaaattgttttaagtcacttgaatttactctacaaattatataatgctataatggatgacatatttttataataacttcaaaatgcttttcagtgaccgtattttccaaataaaaaaatctggaggctggcgtagtggctcacgcctgtaatcccaacactttgggaggccaagatgggtggatcatgaggtcaggagttcaagaccagcctggccaagatggtgaaaccccgtctctactaaaaatacaaaaaaaattagctgggtatgggcgcacgtgcttgtaatcccatctactcgggaggctgagtcaggagaatcacttgaacccggagggtggaggttgcaatgagctgagatcatgccactgcactccagcctgggtgacagagtgagactccatctcaaaaaaacaaaacaaaacaaaacaaacaaaaatctggaaacatgctctaaaatagattttttaaaaactgatttgtggattttctcatatgaagaatcatatgcagttatagataataagtcacatttaattctacatttaacaagtcatctttattttaaaagaaaaaagctcatttatttatatataaagaacttctggccaggcgcagtggctcacatttgtaatcccagcactttgggaggccgagtctggcagatcacttgaggtcaggagttcgaggccagcctggccaacatggcgaaaccctgtctctaccaataatacaaaaattggccaggtgtggtggcacgcacctgtaatcccagctacttgggaggctgaggcatgagaatcgcttgaatcttggaggcggaggttgcagtgagccaagatcatgccactgcactgcagcctgggcaacagagcaagactctgtctcaaaacaacaacaacagcaacaaaaagaccttctaaaaatcagtatgaaaaggaattacaatccaaaagaaaactgaaatatagagagagtttattttaaaaagtaaacacaggccaggtgtcggggctcacacctgtaatcccaggactttgggatgccaaggtaggaggattgcttgaggctaggagttcaagaccagcccgggcaacatagtgagaccttgtctctactaaaaataaaagcttagccaggcatggtgttgcatccctgtaatcccagctacttgggaggctgaggaaagaggatcccttgaactcaggagttcaagactgcagtgagctatgattgtgccactgtactccagcctgggtgacaaagtgagactctgtctatcaaaacaagggaaatgcaaatagattttaaacatgcttaaaaatgctaattctctgaaaatgatatacaaattgatatacaaaatgatatactaaatgatatacaaactacaccattggacaggtgaagttgaaaacgtataataatatgctggactggtcaatgaatagagcaaataggtagaattctatattgatacaacctctttggaggataatttagcaatacttacctaattttaaagtgtcattttcctttcaacttgcaattccacttatagaaattgaatcccataaagtcttatgtatacacaaaggggtgcatgttggatattaactggggtacaagggatattgactgcaacattgtttttgtttgtttgtttgagatggggtcttgcactgttgctcaggctggagtgcagcggcatgatctcggctcactgcaacctccgcctcccaggttcaagcaattctcctgcctcagcctcctgagtagctgggattacaggcatctgccaccatgcccggctaatttttgtatttttagagatggggtttcgccatgttggccaggctggtctcaaactcctgaccttaggtgatccacctgccttggcttcccaaagtgctgggattacaggcatgagccaccgcgcccggccaacattgtttataattgtaaaatagaagagtggttaagtgaccatgggctaactggttaataatccctgtgtctgttaaaaaggaggagaaaaaggctgtatgaacacttaaagaaatatctctgggctgggtgtggtggctcatgcctagcatattgggaggccaagagagatcacttgagtccgggaatttgaggccagcttgggcaacatagtgagaccctatctcgacaaaaagattaataagatatatatagccaggcatgctggcatgcgccagtagtaccaggtactcagagctgcggtgggatgattgcttgagcctgggaggtcggggctgcagtgagctatgattgtaccactgcactccacactcctgggtgacagagtgaaaccgtgtctcaaaaactaaaacaaaaaaacctctgatatattcattcatcgttacacagatttgcctacgtggacctggaaatatgctctaaaactggattgtttagtgatttgtgagtttttgcatatgaagaacatacacagttatagacactaaatcacttttttgttgttgttgttagatggagtctcactctgtcgcccaggctggagtgcagtgaagtagccgatctcggctcactgcaacctctgcctcccaggttcaagcgattctcctgcctcagcctcccgagtagctaggattacaggcacacaccaccatgtctggctaatttttgtgtttttagtagagatgggtttcgccatgttgaccaggctggtctcgaactcctgacctcacgtgatccacccacctcggcctcccaaagtgctgggattacaggcatgagcactgcacctggccaacagtaccttatttttattgctggccctgaagaaacctatacagtactcagatacagtaaagtttttcatacaacacgagctcatttctctcaaacatggactggggtttcctgtcgtgttgatttagcagttcggggactgtaggtgcggcaggattgtcccatcccacctctctaattagtctcgtctctaccattttcagtcaaaattccaaaggtcacttggaaggcacatagcccacgaaactgtccagacactcccttttggccaaataaccctccacagcccagattccagtgcagagccctgggaaccaggggcatgctgtttccaatcctcatctgcttagccaacagggagaggtaacaatgaacaaattgagtttcaaccagcatatctttagaacccaatttttgttataattgattagaaaatctagcttacattccaaatgcactctttttttttcttttcttaatcttagtcaaggtgcaataacagttaaacgaaaaccagcatgagtcaggttcctataaaactgtctgctctcagagttcagcatttttctagagcaggaacatttgccggcagtcagcatagaacggggttattctggcctcttacttttctaggggaactcatcataagacaagcagctcacgtggaatctgacactgacatggaatgcacacactgggtggacattgatggagttcttgggtctcactctgttgcccaggctggagtgcagtggtgtgattttggctcactgcaacctttgccttctgggttcaagagactcttatgcctcagccaccccatagctgggattacaggcacccgccaccatgtctggataatttttatatttttaatagagacggggtttcaccatgttggccaggctggtctgaactcccagcctcaagtgatctgcccgcctcagcctcccaaagtgctgggattacaggtgtgagccatgtcgctcggccagggaactcttaagtagaatttgaaaaacagcagcagcaacaacgatacacctagggacattggagtcaaattgataaaactaaataaaaatacaatgttgaacatggtcagaaaaaacaagaccttgcatacaggggtgcaaatattcaaatgaccgtggacttatatcagaaataaatgaggccagaagacagtgaaacaacatcttgaaagcactgggaaaaaaaaccagtcaatccagaattctgtatctagtgaagatatcttttaagaataaaggtgaggctgggtgtggtggctcatgcctgtagtcccagtgctttgggaggctgaggcggtgggggatcacttgacctcaggagtttgagaccagcctggccaacatggtgaaaccccatctctattaaaaatacaaaaattagctgggtgtagtggcgcgcgcctgtaatcccagcttcttgggaggttgaggcacaagaattgcttgaaccaggaaagcagaggttgcagtgagctgagattgtgccattgcactccagcctgggtgatagagcgagaccctgttgcaaaaaaaaaaaaaaaaaaaaaaaagaataaaggataaaggtgaggctgggtgtggtggcttacgcctgtagtcccagcactttgggaggctgaggctggaggatcaactgaggtcaggagtttgagatcagccaggggaaaaaggtgaaaccctgtctctacaaaaaaatacaaaaattagccaggtgtggcggtgtgtgcctgcagtcccagctgctcaggaggcttaggtgggaggattgtttgagcctggaaggcagaatatgaagtgaatcaagatcatcctgccactgcactccagcctgggtgacagtgcgagaccctgtctcaaaaaaaaaaaaagaaaaaaaaaagaaaagaaaaagaaaaaagaataaaggtgaaataacgtggacataaagatgggaacgatagacactggggactactggggggagaggaaagggggtgtgggctgaaaaactacccgttgggtactgtgctcactacctgggtgatgggatcatccgaaccccaaacctcagcatcacacaatgcacccacatgacaaacctgcacacgtaccctccaaatccaaagtaaaactatatatatatatataaaaaggtgaaataaaaatgtttttagtttttaaaaaaactaggggaatttgttagcagcaaacctgagctacaaggaatgctaagggtactttaggaggccaaggtggaaggatcgtttgaggccaggagttcaagaccagcctgggcaacatagtgagatcccatctctgttgaaaaaaatgctaaaggaagagttctgcaggctgaagggaaatgaaaccagatggaaacctggatctacaggacagaatgaagctcgtcagaaatggtaaatatgtggataagtagaaaagattacttttgtcctcttaatttctttaaaacagataattgtttaaagcaaaaattatattgtgttatggggtttataatttctgtaggtgtagtaattatgacaactataacataaataacagggggtgtacatgagcctatatagttgcaagctttctgcattttatgcaaagtggtgcaatataaacttttggcaggctataaaaagttaagggtgtatattctaaccctagggcagtaacttaaaaataagccaaaaaggtgtagctgtaaagcaatggacaggttaaaatggaattcaaaaatatattcaggtaatcaaaaggaaggaagagaaacagaattaaaaaatagaagacaaacaaaacagtaaaattacaggcttaaatctaattatatcaataattatattaaataagaaggaatagcattgtagttaaaaggcagagattgtcagaatagataaaaatgtttgggaggccgaggcaggtggatcacaaggtcaggagtttgagaccaccctggtcaacatgatgaaaccctgtctctactagaaacacaaaaattagcctggcgtggtggtgcgtgcctgtagtcccagctacttgggaggctgaggcaggagaattgcttaaacctgggagatggaggttgcagtgagctgagatcatgccactgcactccagcctgggtgacagagcaagactccatctcaaaaaaaaaaaaaaaaaaaaaaaaattccaaggcccaattatatgctgtctataagcaacctgccttttttttttcttttttttctttttttttttttcttttaagacagggtttcgttctgtcacccaggctggagtgcagtgacaccaacacagtttactgcagtctccacctcccaggccctcatttctcaatctcctaagtagctgggaccacaggcatgcaccaccatgtctggctaacttttgtatttttttttagagacagggtctccctttgttgaccaggctggtctcaaactcctgggctcaagtgatttgcctgccttggcctcccaaagtgttgggattagaggtgtgagccaccgtgcctggcctataagcaacctactttaaatataaagacacaaatgggttgaaaattgataggaaaagatatatcatgtaaaccttaagcataagaaggcttaattggctttacaaacattaatagttttcaagacaaacaatattaccagaaaaaggaatcttttataatgataaaaggtcaatacattatgaagttgtgatcattgtaaatgtgtatatacctaataacagagccccaaaacacataaagtaaaaatggacagaaaaaaagggtgtgactggaggttgagggtggaagacttttttttaaatttcaattttatacttcatatggtttaaattttaacaccaaatgtgtattctgccatcatcatcatcatcatcaaaagagtgaaaataatatttgagccaagtcttaaaagatgactaagaatttttcagaaaggtggtaagggagggcattccaggcaaaggtcatatgtgtgccagcacagggaggcatgaaattgcctgatgtgttctggtcctgcagttttttggcaagtctgaaatataggattgggttggtattactgaggaggaatgggagatgagcaacagacaagtagaagccagatgtggaaggggcttatcagtgtgctcatttgaactttatcttgacagtcatggatagtcactaatgtgtttttcaaagggaggatacaggattttctctgggctttagagagacaattctgactgcagcttagagaatggtttagaggagaccagagtgaaggcagagtaacttctgggagatgctgtagtaatgcagattagaaatgctgggggcctaaaccaggaaagtagagcagagatggagaaaaaacaagtgtggttttgaaaggtatgtagggaccaggcacagtggctcatgcctgtaactccagcactttgggaggccaagccaagtggatcacctgaggtcaggagtttgagaccagcccagccaacatggtgaaactccgcctctactaaaaatacaaaaattagccagacatggtggtgcatgcctgtaatcccagccactcaggaggctgaggcaggagaatcatcacttgaacctcaagaggcagaggttgcagtcagccgagatcatgcctttgcactccagcctgggtgacaagagtgaaactccatctcaaaaaaaaaaaaaaaaaaaggaaagaaagaaaaataaaggtacatagtaagcaaaataatgagaattttgcaattctggatctaagtgatgagagacattgacatctattaactcctgcaagtttagtctcatgaaaccacttagtgacacgatactttattcccatttccataaaacaatattgacataatgatatctaccatttaaaaagtttattttattcaatgcaatccctataagaatctcaactggtttctttatgtaatagaaatggacacactgctgatcctaaaattcatgtgaaaatcaagggacttaaaatagccaacataatcttgaatagaagaaaaatgtttggaggacttaaacttcctgattccaaaacttactacaaagcaaaggtattcaagacagtgtggtactggcatgaggttagacatatagatcaatggaaaagaattgagagtccagaaataaatccatatattaatggtaaattgatttttcaacaagggtgccaaaagcattcagtggcagaaaaaaatagtctcttcaatatatggtgctgggacaactggatatctatatgtgaaagaatgaagctggacccctacctcacaccatatacaaaaattaattcaaaatggatcaaagacctaaatgtaagagcaaaaactatgagattcttagaagaaaacaaataagtaattctttatgaccttggttaggcaaaatggtttctcagatatgacacccaaagcataagcaacaaaataaatatagataaattggacttcatcaaaattaaaaatttgtatgcttcaaatgacactaataagaaagttggctaggcttggtggcccatgctgtagtcccagcactttgggggggctgaggtggaaggactgcttgaggctgagagtttgagaccagcctggacaacatagcaagaccctgtctctcaaaaaaaaaaaaattagccaggtgtgtggtgcatacctatagtcccaactaccctggagctaatgtgggagaatcacttgagcctaggagtttgaagctgcagggagccatgattgtgccactgcactccagcatgggtgacagagggagatgctgtctcaaaaacaaaaaacaaaacaaaacaaacaagaaagtgaaacgactaaacaatggcagaaaatacgtgcaaattgtacctctaataagggacttatatctagaatacataaagaactcttacaacccaagaataaaattatcccaattaaaaagtggacaaaggccgggcgcggtggctcacgcttgtaatcccagcactttgggaggccgaggcgggtggatcacgaggtcaggagatcgagaccacggtgaaaccccgtctctactaaaaataaaaaaaaattagccgggcgtggtggcaggcgcctgtagtcccagctactcggagaggctgaggcaggagaatggcgtgaacccgggaggcggagcttgcagtgagccgaggctgcgccactgtactccagcctggggtgacacagcgagactccgtctcaaaaaaaaaaaaaaaaaaaaaaaaaagtggacaaaggatttgaataaacatttctccaaaaaagttctacacctggccaataagcacatgaaagggcgctcaacatcattattcctcaaggaaatgcaagtaaaaacacaatgggctactcacttcacagccactaggaagcctgtaataaaaaagacggctagtaagtgttagcgtggggagactgataccctcataccctgctggtggggatgtaaaatggtgtggccacttaggaaagcactctggcaatttctcaaaaagagctgccatttgacccagcaattccatgcctaggtatataggcaagagaaatgaaaatatgttgtattagtctgttttcatgctgctgataaagacatacctgagactgggtaatttataaagaaaagaagaggtttaatggactcacagttctacgtggctggggaggcttcataatcatgacagaaggcaaaaggcatgtcttacatgctggcagggaagagagggctcttgcagggaaactctcctctataaaaccatcagatcgcgtgagacttactcattatcacgagaacagcacgggaaagacctgcatccatgattcagttatctcctgagtccctcccacaacacgtgggaatcatgggacctacaattcaagatgtgatttgggtggggacacagtcaaaccatatcatatgtccacacacaatctcatacatgaatacttatagtagtattattaataacaggtaaaaggtggaaccaatctaaatgctcacccactgctgaaaggataaacaaaatgtggtatatccacatgatggaatattacttagctgtgaaaaggaataacatgctgatatgtgctaccacacagatggaccttgaacatattatgcaaagtggcagagacagttacaaaagatgacacagtctatgagtccatttatatgaagtgtcctgaacatgcaaatctatggagacatagaggagattaatggctgcctagggctgtgaggagggggtgattgggggtggcacatgatagctaaaggggacacagctggtttggagagtgaagaaaatgttctaaaattgtactgatagttgcacaactctgtgaatatacaaaaaaatcattaaattgtacacttaaaatgggtgaattgtatggtgtgggaattatatctcagtaaagaagttaccaataacattacaaaacaagaaaaagagtttattttattttattgagaggtggggcttcaccctgtcactcaggctggagtgcaatggcaccttcttagttcactgcaacctcgaactcctaagctgcctcaaactcctggcctcaagcgagcctcccacctcagcttcctgagaagctgggactacaggcatgtaccaccatgcccagctattaaaaaaattttttttttgtagatggagtcttgctttgttgcccgcgctggtctcaaactcctggccacaagcaattctcctgccttggcctcccaaagtgctaagatcacaggtgggagccagtgggcccagcccttttaatttttaatttttaagttgtacagatgatatatgtgtattttatttttaagaaaatcaaagtatagcaaggcgtagaggaaaacattttaaattacccccttatcccaaattttgaatcctaccgcagttctaagaggaagccactgtcatcagtttaatgcaaatctttcttcacctttttttgtgatgtataggtatgaacgtaaataagaagatgtagatacatcatttagttttctgactttaaaaataaaagggttcgtgtggtatgtattgctctgctgcttgctttttcacttaacattgtgttttggagatccctctgtgttattacatagagatcttcctttgctttaaaaaatactgcatggtataatattatatagcaaagatgtgtgtaggcttaatacttagtagtgaaattgttgggtcaaagggtgtggggtttaaaatttaacagaggccgggagcagtggctcacacctgtaatcccagcactttgagaggccaaggtggaaggatcacttaaagccaggagttggaaaccagcctgggcaacatagtaagaccctacgtctaaaaacttggctgggtgtggtggcacacacctgtggtcccagctgctttggaggctgaggtgggaggattgcttgagcccgagagttcaaagctgcagtgagctatgatcacaccactgcactcctggaggggtgacagagcaagaccctgtctcttaaaaaaaaaaaaaaaagaaaagaaaaataaaatgtaacagatactacacattgttttttagaaaggctacacagtttcacacactcaccagcagtaaatacatacatctttcaataacattttgtaatatcaaataatggatattaatacttttaaattttgtttgtttgatagctcattgttgctttaacttctattttcctgattacttataaggttaatgaatatgaaattccctaatgttttcactctgagttatttttcttaggctgtctggtgtattttttacatctttttatttcaagggctttatttttagtttgttttacccatagctcttgtaaacagcaagtagctgattttcttggttgaagttcttataaatttacctgatctggcagctgaaaaaaagggaacttgcaaaatttaacagtttgttaatgacaaatcactaaaattgtttaaaagttgtctatttggccatgtattgtcttagtttagcatattatcatgtgctgtagaattaaagtttatttatatagtacattttacgtttttgtttgtttgtttgttttgagacagtcttgctctgtcgcccaggctggagtgcagcggcacagtctcagatcactgcaacctctgcctcccgggctcaagcaattcctgtgcttcagcctcctgagaagctgggattacaggtgtgcactaccatgcctggataattttttgtatttttagtagagatggggtttcaccattttggctaggttggtcttgaactcctgacctcaagtgatccgccccccttggcctctccaaacgctgggattgcaggtgtgagccactgcgcccagcccattttaagtttgaccaaaaagaattccacttggtcattatgatgattttaaaacatgtccacaaattgtttgccacttctctcactaaacgtggagtctaattcccctgccctcgaatgtgagctggccttagtgacgcacttctaacaagcagaatgtagctctggtgctgtgttcccttccagcttccagctggctcttttcctattgaaatccatgtccttggaacctagccaccatgttgtgaggaagcccaagccacgtggagaggaaaggaggctcccagccaacagccagtatcaactgccagacacataaatgaaccagccctgggatgactgcaactcccagcttataagtcttccaaccaaggccccaaacaccctaaagcaaaaacaggccatcttcgttgtaccctgcccaaattacctatccatagaatccgtgagcaaaataaatggttgatgccattaaattttggggtaatttattatgcggccacagtaactagcatatttattgataaagagagttagccaggcatggtggctcacacttataaccccaatgcttttggaggctgaggtgggagaatcacctgaggccaaatatgtaagaccagcccgggcaacatagtgagatcctctcttaaaaaaaaaaaaaatagctgagtgtggtgggacatgcctgtggtccagcccaggaggacaagttgcagtgagctatggttgtgccactgcactccagcctgggcaacagagagagacagaatctctctctttaaaaaaagagagacagttttagaggtgtttctcaacaccttccaggtggggtgaaaaaaagaagacaatcttgcctagaaatgtaattatgttattctagtaaatcacttctccactgtcctcggtgagatatgtttgaaactgtttataccatcttattttaggtttcctatttttatttctaaatagaaatatttttctttttttgtctttcttttttcattaaaaaaaatcgtttccttcattgaagaataggattttctttcttccattctttttccctctgggaattaggatatatagaatttatgcatcttttattcttctaggattacaatcttttttttttttttttttttttttttgagatggagtttcactcttgttgtctaggctggagtgcaatggtgtgatctcggctcactggaatctccacctcttaggttcaagcaattctcctgcctcaccctcccaagtagctgggattacaggcatgcaccatcacgcccggctaattttgtatttttagtagagacgaggtttcaccatgttgaccatgctggtctcaaactcctgatctcaggtgatccacccaccttggcctcccaaagtgctcggattacaggcgtgagccaccgtgcccagcctacagtcacatttttaaaagatattttttctaccaatatttagtggtgcccagtatctttcctgtcctgaacaagacaaagaacttagtaggatttcacgcctctccttcttctctgcccctccatctctcatgtttacgtcatctgaacttgagttttagactacctttaaaaaaaaagcaattatttatctttaattataagttcatgtccccaccccattttttttttttttgcttgtcactgtttttagtatcacttatctttctcatggattcattttctgacttgttggaatttgtcttataataaaattttcagggaattctttgagggtaaattttatgagtctttagatgactgaaaatgtctttattttgtgctttccatttttttttttttttttttttttgagacagaatcttgctctgttgcccaggctggagtgcagtggcgcgatctcggctcactgcaagctccacctcctgggttcacaccatcctcctgcctcagcctcccgagtactggggactacaggcacccgccaccacgcctggctaattttttttgtgtgtttttagtagacacagggtttcaccatgttagccaggatggtctcgatctcctgacctcatgatctgcccacatcggcctcccaaagtgctgggattataggcgtgagccaccgcgcccggcctgtgctttccatttgaatgatggtttgacttggtgtagagctctgggtttaaaaattgtatttcttttcttttctttttttttttttttttgagagagagtcatgctctgtcacccaagctggagtgcagtggcatgatctcgactcactgcaacctctgcctcccaggttcaagcaattctcatgcctaggcctcctgagtagctggaattacaaatgtgcaccaccacacacagctaaatttttgtatttttagtagagacggggtttcaccatgttggccaggctggtctcaaactcctgacctcaagcgatcagcccacctcagcctcccaatgcctgttgggattacagggatgagccaccgcacccggcttaaaaatggtatttatttcagaactatctatagtgtgttctatcatctcagcacccagtgttgccagtgacagacatgatgctaatatgattgtcattcttctgtgggggcctgatttcccatctctgtttggcaggattttctctttctcatgctgaaatttcatgagatgaacttcctcttcattcttctcccttcatcagtcttcacccatcttctcttttgttccttctattgtaacaagggaggtgaccctccttctgcccccagtcaagccctgttctcatgctctggacgcattttctttcacgttctcaggggtgccaccccacctgcattgaactatgctctagggtcccccacttaagaaaacaaaacgcctctctctgactacgcacctttccacccatctccctatttctttctttcttttttttttttgagacagagtctagctcttctcccaggctggagtgcagtggtacaatcacagcttacggcagccttgacctccggggctcaagccatactctcacggcagcctcctgggtagctgggaccacaggtgtgcaccactgcgcccggctaattttttttttttaattatttgtagagacagggtctagctatgttgcccagggctgctcttgaactcctggcctcaacgatcttcctgccttggtttcccaaagtgctggggttacaggcgtgagccaccacacctggcccttacttcttgactcttcactcataactaaacttcctgacagagttctctgtaaacactatctctgcctattcacctttcattgatttcccaatgcggtttcatctgctccctacactttactgaggttgttgttggaaaggcgccctccctgttttaaggcccagcagtggcccctcccctggtcctcagcagcgtgctgcagcctcccgttggtgaagtgcttcctctcttgctgtctacctgctgcttccagtctccggcgtcagctcctcctctcccaggggcagcctcacttgtctcctctatctgcactgttcttctggggactctaatcctctctaagggcaccttgttgatcgccttgttgtttagtaccaaattcatgtcttcagcccagaggccaagcctgagcatcaccctctaacatctgatctctctatctgtctatttcacaggtatctcggaattaacaagtctaagatgaaatcttggtttccctgtgaacttacctcctgcccctaatctgccccttctttccagctacttaagccagaatttgaggagccaatctctacctctccttcttccccaccgttccatgcctaatctcttataatctattctctcctctttggctcaaaatagacctatcaacttcttatccccgctgccaataccctagtacaaaccactgctgtctcccacctggaccacaacgatgggctaaccctaactgggctccatgcctgccttcctgttcccttaccatacattctccaaccagaggcactgttgcaaaaacataatccagtgcataacttccctttgcgcttaaaataaaccctacaaggcccagcatgatccagcccctgcttctctctctccagcaacacctatgtccttctccagccccacccagcttcacaccttcattcatgcaggaacttcggtctttcagtttcagcctctgtgtcagcaaagaccccttccattttgaagagaatcaaccagttgaggagcgggtggatgatagagcaagttgcccacagagacagcaaattggactcattctcccttccagtgacgaaggatatttatttttctgactcaggactaaagggggctgagaggcccatgctgggaaaagtacttgcaatacatatggcagaggaagggttaatatcctacacgcacagacatccttgagaagaaaagcacaaaaaattcaatgggaaaaggagggggaggaatttaataggttttccacaggaagagaaatttaaatagccaataaataagtgaaaagatcagtttcattagtaatcagggaaatgccaattaaagaaactagagcaggtttttaaagaaaaaactcatcagattggcaaaaattaaagagtggctggctggtaagaatacatgaaatcagacactgtaccttgtgggtagaattgcagcaatgctttggggaaataattcggcaatgtcattcagataaaaaaaacatacacgtggccgggcaaggaggctcacgcctataatcccagcactttgggaggctgaggctggtggatcgcttgagcccaggagtttgagaccagtctaggcaacatggcaaaaccttgtccctacaaaaaacacaaaaaattagctggacatggtggcacaggcctgtagtcccagctactcaggagtctgaggtgggaggattgcttgagcctgggaggcagaggttgcagtgagccaagattgcgccactgcactccagcctgagtgacagagtgagacgctgtctccaaaaaaaaaaaaaaaaaaaggaaaaaagttccctttgacccagaaatgacaattcttgagaatctatcttctaaaattaccagcctacaagtatatttacaccaagatggcattttagcactgtttgcaatggcagaagtcagaggagagggtaggaaaagattctaccaaaacagaaaatcactcatgatgtcatgttaagtaagataggaagaaacaaacttctatcactattactccaaatctgtaaacattgactaagtatgtggacaaagggtagagggtgccatgtatctacagaaatattgatttaaacagctcgtggaactgtgggggagttttgtttgaattgtaatattgttttgccaattatgtaaataattttttaaaaaattattttattttattttattttattttatttttatttatttattttttttgagatggagtcttgctctgtcaccgaggctggaatgcagtggtgccatcttggctcactgcaacctccacctcccagattcaagagattctcttgtctcagcctcccaagcagctgggattacaggcgtgtaccaccatgcccggctaatttttgtatttttagtagagatgggatttcgccaggttggtcaggctggtctcaaactcctgacctcaagtgatcaccctgcctcggcctcccaaagtgtgggattacagacgtgtattttaacttttttgagacagttttagtctatcccccagcctggagtacagtgctgcgatcatagctcactgcagccttaaacccgtgggctcaagtgatcctcctgctttagcctcctgagtagctggaccacaagtgtgcgccaccacgcctgccttatttatttatttatttatctacttattggcatatttatttatagaggtggggggtcttgctatgttgaccaggctggtcttgaactctcagcctcaagcaatcctccctcctcggcctcccaaagtgctgggattacatagtgagccactgtgcctggccatgaatggcaaataataaaaaaaaaaacccacaaagaagccataactgagcattcttctgttacttgatggatctgtagagaaattaaactttgctttcaataagacaaactactttcatcagagagatttccaaaaatagtacttcctcactttctggtgaaactattcctcattttgtattgctttatactaatattttttggtttaatattgaactcaaccgctttttcaaagtttttgcaatacagctagtatattttccctactgaagacatcctcttccttctaaaaaaacaattgcttggttggttttgcccattatataattgtaaacagtggacacagatgacccaaactaccccttggagctttagtctttcgtgatggaccaattcctccattcttttaatagctttggttcctctttgcacgctgccagccagaaaactctacatgcttgtggtagaaagctgccctagctaagcacagttttctgggtgtggctctaccgtacttccctcatctgagcagccatggctctcgctggcctttttgggttctctggcactagctggtctgtgaccttctcctgagagggcctcttcagtgtctctatgtgactgtgctaccaccaactacggccacagtctctatcactcatactctctgccacttatagactccactaaatagatctatactttcccaatcacatgtgagcgttaacatgtccaagctcacttactatgatgactgttatcatttttaaaaggagaatgacaagtgttggtgaggatgtagagaaattgaacattcatatattgctggtagaaatgtcaaagggtggccaagcatggtggctcatgcctgtaatcccagcactttgggaggctgaggcgggtagaacacctggggtcaggagttcgagaccaacctggccaatatggggaaaccccctctctactaaaaatacaaaaattagcccggcgtggtgacgtgcacctgtagtcccaggtactcaggaggctgaggcaggagactcgcttgaacctgggaggtggaggttgcagtgagctgagattgtgccactgcactccagcctgggctacagagcaagactccgtctcaaaaaaacagtgaaaagttgcagtcactgcagaaaacaatatggtggttcctccaaacattaacaatagaattcctatatgatccagcaatttcacttctgagtacagacctgaaagaactggaagcagggtctcaacaaggtatttgcacatccgtgttcatagcagcattattctcaatagccaaaaagtagaagcaccccaagggcctatcaatgcatcaatggataaacaaaagatggtacgtccatacaatggaatattattcagccttataaaggaaggaaattctggtgcgtgctacaatatggataaaccttgaggatattatgctaaatgaaataagccagtcgcaaaaagcaaatactgtatattctaagcaaatactatatgaggtacctagggtagtcaaacttatagaaacagaaagcaaaatggtggttgccaggggctggggctggggggagtggagttgttcagtgggtacagtttcagttttgcaagattaaaagagttctggagattggttgcacaacaaatgaatgcatttaatacgactgaaacatacacttaaaattggttaaggtggtgaattttatcttatgcatattttaccaggatttaaactttttcttaaataaaaaaaaaaaggcttggagctgggatccaaaccccatcatctggtggcagtgctaactctgaacagtaggctatgctagtcctgcaggtaagaggacccacacacattagaaggcagttcatgttcccactcctgccagagcgtgcaccctggcggtctcactccccagcccaagcagcttatcaatggattccttatatgtacattcagggcactgcccctccacccaccccacctctgtccagctgggttctggtaaactcatttctgtgtcttcattaattctctcatgactggtgtcttagcagccaccctcaatcacacacaacaaaagcagcacatcctctatcacctataaagctggagcctgggccaagcgtggtggctcacgcctataatcccagcactttgggaggctgaggcaggaggattgctttagcccaggagttcgagaccagcttaggtaacatagtgagaccctcgtcactacaaaaaaatttaaaaaactagccaggtatggtggtatgcacctgtagtctcagctacttgggaggttgaggctggaggatcgcttgagcctgggaggtcaaggccgcagtaagccatgatctgagccactgcatttcagcctgggcaacagagcaagaccttgtctcaaaaaaaaaaaatctggagcctagtgagtggtgaacacacattaattaataatttaataaattattaattaattgttggtaattaataatcaccatctggttattaataagcatttaattaatatgtaataagtaatagcattaaatgaatatagacaaaaattgagaatttaaaattggatgtaagaaataacttcttggtaggtccactttatttcttttattctttttctttttttctttcttttttttttctttaaagcgataagggcttgctctgtcatccaggctggagtgcagtggtacaatcacggctcactgcagccttgaactcttgaagtgatcctcccacctcggcctcctgagtagttgtgactataggcatgcaccaccacacctggctaatttttttgttttttgtagagacagagtcttgctatgttgctcaggatggcctggcctcaagtgatcctcctgccacagccttccaaagtgctgggattatgggcatgagccaccatgcctggcccactccatttcctaataggtgacattgtggcatacactatttgtacatatctatgctatattatgcctttctgaggtcatttattattaaaggaaatttttttttgagacagggtctcactgttgcccagggtggagtacagtggtgaaagcacagctcactgcaacttcaacttcctcaagcaatcctcccacctcagcctctcaagtagctgagactacaggtgcatgccaccacacccagctaatttttgtattttttgtagagatgggggtctcgctacatttcctaggctggtcttgaactcctggccttaagtgatctgcctgctttggcctctcaaagtgctgggattacaggcatgagccacggcacctggcctctgaggttatttaaatctaattctgcttaataacaatttaggaatatgctaaattgcctcttaacgtgttttcccattggttaagtccagaatccatcagggttttataggtcttactgacttacaagcaagaggaactgagtctagttaacttaaaccaaataatctatggaaaaaatatggagaagctcatagaaaccaagaaaaaacctggaacaactgcacaaatgacagtcactagagcaactccaggaatccagatggcaggaacggaccagcatctactatggtgccgctgctgctgagaagaaccagcccagccattttctttgtccctgctgtcatcattggaattcgcaagaggaacatctgatattgctctagcctgcttaaccaaccaatcacagtgactctgttgtggcccggccaggctggctgctcaaagaagaatttgtgccattatcaaaagaatcagtgggtgatgacaaggacgagctgtgtccaccccaaagactcatgagcctttctccttggcagtgccttccaaccaagcatcttctttttttttttttttttttttttttttttttgcccaggcaggagcacaatggtgtgatctcggctcactgcaacctccgcctcccaggttcaagtgattctcctgcctcagcctcccgagtagctgggattacaggcatgcgccactatgtccagctaatttttgtatttctagtagagatggggtttctccctgtttgtcaggctgatcaagaactcccaacctcagatgatctgccccccttcggcctcccaaagtgctgggattacaggcgtgagccactgcacccggccccaacctagcatcttatggacgttacttggcttatatagactcaggtatggctttaattttttaaatgttaagtaatttttaaccagtccctaaaatactgtcaccctccgtgacatcacctctctgtccacacagagaatggacaaggtccaggagagcacaaatctaccccatccattttgaccccaattccagtttatgaaattgataaatacctggactgtctatgcaagacactttcttgtggcaagtcaagttctattttcctattaagttatttacaatattaaggttttgtcctcttcatttttgactgttcttcagtaaatactggccatgactatgggactgtcttatgaattaagtgatgctctgttcaaagactactccatgtgagatcctgtaacactgctgcttcagtaaagctgttttcttctacctttggctcgcccttgaattctttcccgggcaaagcaaagaactttcttgggctaagcccttatctggggctcacctgccctgcatcagtattagcacaaggacagacaaactgaccagtggaaaagcacgtacagatacatacagtcaactgatttatgaccacagccacctgtattgcaatgaggaaagaaaggatgaactcttcagccaggcacagtgatatgcacctgtaatcccagctactcagaaggctgaggcaggaggatcccctgagcccgggagtttgagaccagcctgggcaacagtgagaccccatctcttaaaaaaaaaaagagagagagagagagattatctttgataaatgatggaaataatagtgggtcatgctgccctatcctatgtggatgggcctcatccaatccactgaaggcctgaatagaacaaaaggctgtgtaagaaaaaattctttctctctgtgtggttgtctccaaactgggacatgggtcttctcctgcatggaacttaaaccgtcagctctcctgagtttggacttctcagactctgtaattaggtgagccaattccttgtaattaatctctttataaacacacagacagacacacacattctattggtctgtttttctggatagccctaatatagtatgttatactttgacaaataattttttaactgtttaagaaaatatgtgaataaaaaatctggcctggcatgatggctcatgcctgtaatcccagcagtttgggaggctaaggtgggtggatgaccttaggtcaggagttcaagaccagcctggccaacatggtgaaaccccgtctctactaaaaatacaaaaattagccggatatggtggcatacgcctgtaatcctagctacttgggaggctgaggcaggagaatcacttgaacctgggaggtggagttgcagtgagctgagatcatgccactacattccagcctgggcgacacagcgagactccatctcaaaaaaaaaaaatttctccagtgactaagatctataaaaatatcatcaaatggaaaatctagtgtgaaaagggcaatagccaaaattaagacctcaatagatggagttaacagtcaatgcacattgaagagaggtcactaaactggaaggcaggtggattgaaaagctgaatggagagatgagaaggtcagtgaactggaggataggtccagactgaagtacggtgagaggaagaacatggaaactatagacagtaatttaagaggtatgttaaaaatgtttaatgtcctatcattggggttcccaaaagaggaaagagagaaggaggccgggcatgatggctcatgcctgtagtcccagaactttgggaggccaaggtgggcggatcacttgaggccaggagtttgagaccagcctggccaacctggcgaaaccccatctctactaaaaaaaaaaaaaaatacacacacaaaaaattagttgggcctggtggcacatgcctgtagcctcagctactcgggaggctggcgcatgagaatcacttgaatctggaagtcagagattgtggtgagctgagatcatgccactgcacttcagcatgggtgacagaatgagactctgactcaaaaaaaaaaaaaaaaaagagagcaatagaatgaatcctaagctgcatatatacaaagaaagccatactcaagcacatcctcacaaatacactaaaaatcaaagagaaatcttaaaagtatctagaggaaaaaaaatcacattatcttaaaaatgaacaatataaatgacagctgagtttttgatagaaaggatagaagccaggtgaaaatggaataatgtcttcaatgtgatattaagacataatttttgacttcaagtcaaaaatgactttaataatcaaaagagtaataaaaaaaagagtaaaaaagaagataattgccaacctagaactctatgttcagtgacctatgcttcagaaaggaaggcgaaatgaataaatgtttaagcaaacaactgagagaattatttacttgtatacccacactagaagaaatgctaaaggagttttttgtttttctttttgtttttttgagacagggtcttactctgttgcccaggctggagtgcagtggcgtgatcatggctcacagcagcctcgacctcctctgctcaaaagatcctcccacctcagccttccaagtagctgggactacaggtgtgcaccaccatgcttggctactttttgtattttttttgttgaggtcttgctttgttgcccaggctgatcttgaactcctggactcaagcaatcctcccgccttggcctcctaaaatgtggatttgcaggtgtgagccaatgtgccccaaaggagttcttcaagcatgagaaaaaccattccagagttaagggcagaaattcaggaaggaataaagagtaagagaaagcataaaatatgtgggtaaatctaagtgaacactggccacatcaaacaaaaataataatgacttctgggttttataaacacctagaatcagaatatatgtcaataacatcacaaaacaagggaagggactttaccagaagcaacctttgaaacaaagatctgagtccaaatgatttatttgggaagttaacccagatcacatcagtatgggacatgggaagtgaggtagggaagggaagggaaccaataaattgtgcataatcccacaaagtatcgctctggctaactgaagcttaattctgcttggaaaccctgggaacaaaggtggaaaatgcagctcagagttaatagcacctgaagcacatagaagatgggcgagttatgcagcaactgtggccagtgatgggttgaaaactactccagggaaattttaatgtcccggcacttctagccagcgctatactcagcctccacagaagcccttgggcggaggtgagtcacagatgctgggagttgtaaactgagccaggatgtgcaggaatgggagtgccaggggatttagatgggggcatagaaggcatctactgcaggaaaagaggaagttaaaatattctaaatgtattcttaatcatccgggaagaaataaatgtaccaactcatactggcgctagtaaatacaggatgcatattgcaatctgcagatttcaaatagtaaaataatatgtatttgagaagctagtagagtggtgaaatggagtaataaaaatgactcagccaggtgcagtgacatgtgcctgtaatcccagctacttgggaggctgaggtcagaggattgcttgaggccaggcgtttgagaccagactgggcaacatagaaagaccctgcctctacaaaaaaaataagagttaattaaaaacagctgggcacagtgactcatgcctgtaattctaatgctttgggaggccgaagcaggaggatcacttgagtctaggagtttgagaccagcctgggcaacatgatgagacttcatctctataaaaaattttaaaaattaacctagcactgtggcacatgtttgtagtctcagttattcgggtggctgaggagagagaatcccttgagcctaggagtttgagactgcagtgagctatgatcacaccactgcactccagcctgggctacagatgaggaattaaaaaaaaatgacttgaataatcaaaatgaagataagagagttaaaacaatgaagagagaagaaggactgatgatagattttaatcttatgtgtcactaattgcattaaatataaaaagatcaaatattccaattaaaatacaattatcagattgaataaaaaacacaatccaactaaacattgcttacaagagacacacattaaatataaagatatagaaaaactaaatataaaactataggaaaatgtagacactgtagacatcaaccaaaacacagtggatgcgcagttatagtcagataggacaaaacaaggctaaggcagaaagcattaagaagttatgactagggctaaagaggggtaatgagaaaagaatcaatcaccaggaagatacgataattctaaacttgtctgacttttggctctctgagcagcgccatggtggttggcaagaacaagcgtcttttgaaaggcagcaaaaaggaagccaagaagaaattggctcatccactttctaagaaagattggtgggctgggtgtggtggctcatacctgtaatccaagcactttgggtggccaaggcaggaggatagtctaaggcaaggagttcgagaccagcctgggcaacaaagtgagaccccgtcttttcaaaaaataagtaaatacatacataaacaaacagacaaacaagcagacaaataaatagcagggtgtggtggtgcatgcctgtggtcccagctacttgggagactgaggtgggaggacctctcaagcccagaaggtcaaggctgcagtgagctatgatcacaacgttgcactccagtctgagtgatacagggagactctgagaaaaggaaggaaggcaagaaggaaggcaggaaggcaggaaggaaggaaagaaggaggggagggagagagggagggaaaggaaaggaaaaggaaggaaggaagagagaaaggaaagaaggaaggaaggagaaagaaagaagaaagaaagaaaaagaaagagagaaagaaagattggtatgatgtggaagtgtgaaagctcctgttatattcaatataagaaatatttgacagacactagtcaccagaactcaaggaaccaaaattgcatcagttggccttaagcgtcatgtgtttgaagcgagccctgttgatctgcagaatgatgaagttgcacttagaaaattgaagctgattactgaagatgttgagggcaaaaactgcctgcctaacttccatggcatggatcttacctgtgacaagatgtgttcaatggccaaaaagtggcagaccatgattgaagcttatgttgatgtcaagactatcagtgattatttgctttgtctgttttgtgtggttttacttaaaaaatgcaacaatcagatacggaagccctcttatactcagtaccaacaggtttgccaagtctggaagaagatgatggaaatcatgacccaagaggtgcagacgagtggcttgaaagaagtggtcaataaatggattccggatggtgttagaaaaagacataggaaagacttgccaatctgtgtatattccttgtgatgtcttcatcagtaaagtaaaaatgcggaaaagcccaagtttgaattgggaaaacacatggagcttcatggggaaggcaggaattctggaaaagctactggggatgaggccggtgctaaagttgaatgagctgatggataggaaccaccggtccaataatctgtttaaaattcagactttttttttttttttgagacagggtctcactctctcactctgctgctcaggctggagtgcagtggcccaatcatagctcactgcagcctcaaactcctgggctcctccttcctcagcctcccaagtagctgggactacaggtgtgtacaaccatgcctggctaattttgtgtgtgtgtgtgtgtgtgtgtgtgtgtgtgtgtgtgtgtgttttgttttttgctggcttttttttttttttagaatttttacatctatattcatgggagagatgggctaataattttctcttcttacgatatccttcttagtttggggataaaggtcattctgtcctcatacaagttgaaaggtgctccctcttttagtggtccctggaacagcaaatatttatcctcctggaatattggatagaatccatcagtgaagccacctggacttgagttttcttcgtgggaaggtgttaaatcataaattcaatttactcaattgagtaaattgagtaatgagatcattcagatttttctactttggtaggttgtgttttttttctaagtttcatccgaattttcaaattcattggcataagagagtcattgtttatcatatcctcttctttttaatgtttgtaagatctgcgggcataacaaagtaccacagattgggtggcttaaacaatggaaatgtatttcttcacagtcctggaggctggaagtccatcagggtgtcagcagggttggtctcttctgacggcctctctccttggcttgaagatggccatcttcttccaatgtcttcacagagtcatccctctgtgtgtgtctgtgtcctgatctcttcttatatggacactagtcatattggattagggtccaccctgataacctcatttaatcttaattatctttttaaaggccctatttccacatatagtcacattctaaggtagtagaggttagggcttcaggatatgaatttggggggccacaattcagcccagaacatggggtgactgaatgtctcatatgctttgagtgtaagttgatagaaccactttgggaaatgattggacaacacgaaagctgaacagacacacattctgtaacccacggattcaattcctaggtgtatacgcaacacaaatgcacatgtgcacatcagaagacgtaggacaatgttcatggaggtgttcataatagccccaaactggaaactaaccacttctccaatggataaatcttggaatattcacacagtagaattttatggagtagcaaaaatgagttatcttttgctactgccaacataggtgaatctcatgaacataatgtggaatgacaagagccagatatgaaagaggaccatctgcacattccatggaattgcatttatatcaagttttctatcaaacaggcaaaactacttcatggtgtttgagggggagggagggtggagactgggataagaatcacaaggggacttctgttccttgatctgcgtgctagtcttgtgaaatttcagagctgtgcccttattagttccttgaaagaaaagtaaagcaaggccgggtgcagtggctcatgcctataatcccagcactttgggaggctgaggtgggaggattgcttgagccaggagttcaagatgagcctgggcaatatagtgagacccctgtctctataaaaaaaatgaaaaaaaaaatagccaggcacagtggtgcacacctgtagtctcagctactccggaggctgaggcaggaggatcacttgagcccaggagtttgaggctgcagtgagctatgatcatgcccctgtagtccacactgggctatagagcaaaatcctgtctcaaaaaaagagaaggaaagaaagaaaaagaaaaagaaagcacctcaaacaagcctgatactgatttgcaactcattaaacaacaaacacttttgtcagtacaatgcaagtatccatcttcttaggtccttgccaggcaggtggccaagaggtcaaatcagcgtgattctctccttgctgctgacagcgtttctaattcagctgctcatcaacagttctgaaaatttcccctaagggactacattttccatggtcagagaaacattaaattgactatttttagaaaaaggagctttgataagagactacttttcattatggaattgagaagaaagaattaggacagaaaacctgggtaaacgagacagaaatagacccaacaaacgtacccagatgtggtcttgatcccttaggaatccaaaactaatttataccacggattcttcttaaggatatggttctcttattcccagctgatttttaggagaatttcggtatgaggtgtccccagagctggccgagtctacagttgccattcccaagcccctcccttctcctctctcttcccggataccatggaaacccataatcaaaggcaacgccaacaactcctcttccttctcccacggggcagagctgagcgctcagagatgcagctttggatgaaaaatgagaaaaaaaaaaaagaaagaaaagaaactgagctcgctggagattcacccttgcaactcttaacaagatttggcatctgtgtacctcatgtgattctgggagaattctgtatcaaaaacagttttgtgtgtgtatgtgtgtgtgtgtgtgtgtgtgtgttttaatgacaatcttgacttgatgaatatcccagtaatcgaaggtgaggttttcctcatatgccggtgcctctttttcccttccctctaaggagagcaaactcctggcagatctcatgtgagtttttggaaataagtgtggctgttactaaatccatgcacaggagaacacattctactctcgggtggatcccactggctcttgtttgcacgtgttttggatggagaggccccttttaaaagataattcactaagcatgtcatttcggtgagttttacttaaatttcagttacagtaaaattctccccgcaggaacacatctcttgtcaagagaaaggaacttaacattttcctttgtaggagtctagctgcctctgtgagcacaaatcctatatatataatccttgaagagaaggtggagaggaggggaggagacatttcccaagggagtggctgtgattatacctacgatagcaggtggtaggagaaaaagtgaatttggcagttttcagagtaatacgacatctctagaaagccattctagatagtccaatctcatggcccattttgggggctttgatcctattgatgggactgtgtaagtctttggttccacatggccttctcactgtggcctcggctgtgctatttaaaatgtactttatcccacgcctgttcctctttagcctcctccgctttccacccccacgatacttaccaccttttaatacagcatgcactgctagtgggagtgtaaattagtcagaaataatagaaaacagcatggaggttcctcaacaaattaaaaatagcactaccataagatccaacaatcccaccagagggtacagatccaaaggaaatgaaatcggcatgtcaaagagatttctgtactcttatgtttattacagcattattcacaatggccgagatatggaatcaacctaagtgtccatcaatggatggatgaagaaaatgtggtatatatacacagtggaatactattcagccttaaaaaagaatgaaatcttgtcatttgcagcaacatggatgaactttgaggaccttatgttaaatgaaataagccaggcacagaaagacaaagtctatgtgaccttactcatatgtggagcctaaaaaagttgatgtggctgggcactctggctcatgcctgtaatcccagcattttgggaggccaaggcaggcatatcacctgagcacaggagtttgagaccagccgggacaacatggtgaaacccgtatctacaaaaaaatacaaaaattagccagctgcagtggagtgcgcccgtagtcccagctgctcaggaggctgaggcaggagaattgcttcaatctgggaggtggaggttgcagtgagctgagatcacaccactgcactccagcctgggcgacagagctagactctgtctcaaaaaaaaagctgatctcatagaagtagagagtagaatagtgattatcagagaagcagggggcagggggtgggggagataggaagagactgatacgaagttacagttagataggaggaataagttctcctatctattggtgatccattgcacagtaggatgattatgtttgtttagcaacattgtattgcatatttccaaatagctagaaaagagaattttgaatgctgtcaccacaaagaaatgataaatatatgaggtgacaaatatgctaaatatcctaatttgattattgtacgatgcatacatgtactgaaatatcacactgttcctcgtacatatgtgcaattattatatgttaattaacgcaaaaaaaataacacggtgtccagcttacctctgttttctattgtttgtggtctgtttcccctgctagaatgggaccccaggaaggcagggagtttcctctcttttatcccctggttcatactaaatgcttaggactgtgccttgcatacagtgagcactcaatagatacttgttggcagtttaaaaagtcagtaccttaattaaccaagtatcaaggcttttaatctttttgcctcaaatcaaactaaaaaccttgattaaaaagtcttaccctgtctctacaaaataatttttaaaaaattagctgggcatggtggcacctgcctgtaataccagttactcaggaggctgaggtgggaggatctctgagacccagaagagctgtgattgcacaactgctctccagcagcctgggcaacagagcaagaccccacctctaaagaaaaaacaaagtctttgctgttatccaaaaggataaaacagattttccagacagagggtcaagttgtgctatctttttccataatatcatttaaaacaaattattaagaaataagttttctaatatgaaattatacaaatcctggacattaaaaaattatgtctgcaatatttacatagcctatgatataaagcaaatttggggttaatcagtttctctaaagaacttaaagacacatttgtctttaatcatggcatgaagtgtctgatagaggaagatcatacgaaaaagtccacatctgattataattattaaactgtgtattaaacgcttggtatgtgccaggcatttttgcctaaattatctccaattttgccaacaacacttcaaggtaaatattaccatcctcagatgaaaaagttgggacccagaaagaagaaactggccaaggtcacatggatctcagatgaggacgtgggttcgctccactcccggatttctccccaaacagcgttctgggtttttcagagcacagtgcaatgcaatttcacatgtgtcattggtttcatattcgcagtcaacacacatgttttgagtaattgttatgttcctggcaccgtgcagcctttcttggagatcactgtaggaagcttggcatctcgctgggaggtactcgggaaccctgggcacatttcgggatgtgacagctgagtgagagccattgtagatgcctggggagttcggaagagggagggatcctcatgggctgggctcttgaagcctaatcatggtgtcccttggccttcccagccaggcaggggccattgttgggtctggctgcctggctgctgcatccccttgcaggggcacctcagtcctcaggagcagtgacctgtcccgtaccatgtggtcttggcagagaggtaacttcagatccatgtctcccactgtcccccgctgcccccctggcctctgtggaagctggagaggccaatcctccttctctgggatgctggggaccggggcctgtgacccatactcagacaatttcaggtccagtccactgcccagaccttggatcttaaagatggtggagcatctgctcacaaggatggcggggcatccataggcagtgatggccatggcgggaagaggccataacggaagatatctggctgtatctccaactggctgttcctaagatgaggcggtgaccaagttccctgagaacaggattgtcttccagctcccaccaaatgtgtgagcctacaatagcttcccaatcaactccttttgaattaatacaatcttaaacctgttgtccagcctatactggaaaagtaagctttttcctttaccctttatccgaaattcaacatggatggatataggtcatgaaaagacgttctgcggacaatcacagaatcagaaggtgaaatctgcttttaaggagtttttctttacctactctgatgctttctccacaggctgatgaaggctgcctgattcttacttaacaaagctgggaaatttcatcagcctgggcaatatagtgaggccctgtctctacgaaaagaaaataaatacaactttaaaaattagtcaggcatgaggtgagaggatcggtgaaacccaggagttcaaggttacagtgagctaccattgcaccactgcactccagcctggccgacagagcaagaccctgtctccaaaaatagttatcataataaaacgctaggaggtttcagtgttttcttcattcttccgaagctagggaatcacacaccaggacaagagagagagcccatcaatttgccatgggagagctcaggctttccgggttgggctggggttctggctgaggcatcaggagctgggcatcaaggccctgggctccctgctgggtttgatctgtggactgatgcagggagaggctttcctgtattttggcccagagcacatgatcttatctgcaaaaccgcagcactgtgcctggtgctgaaaccatgagagaattaagcctcgatgacccagttactggacaatgctgtccagctccaggactgctcgttgcttccacagtatgatgtgttaattcgctgactgtattttcagagtccatccactgccctaaactctctgcacccacagttccaatggggagcagtaacttcagttcatcaaagccaattattccagttcttctttttcagcttggatttttccatttcaagtcgtcatgggaaagtaagtcttaataaatccctttatgcacggagaactagggcaattactgacattttaagaattattgaaacttttttaaagttttttgattaaagttctaaaggacataaataatccttttttggtttttggaagggcttcaattattttcaaggacagaagttgggcacacgggctgttcaaatctaattaattatctggctgcgcccacaaaagtcacaccttcaaaacactgaggttacagctaatcatctgagattctcccacactgggataactgtacccaccctctggggccatgacagatacaagtacaggatgcgttataggaactcaaggtgcacctctgcagggaaatcaagttttgtttgtttgtgactcaacgatttagtcgtgcattaaatattcaatatctgatgcaagagatttaaaatcctgaggtggtaccttgaagcaaaaaacacacaggctgggttaaccaatcacattaatatttttataccataaattagattagaaatcccacagctgggaaaagccagggtggaaagatcccagggaatgatgtggctccgaaaaatcagtggtgagcaaacttcatgaggctggataggggtctgttttggtttaggatcaataggaaactgaaggcaggtaacctttgaccattggagagacatacccatgccaaccagagttcactggagttgatttactgcactacggtatgctctaaaaataagcacatagtttgactgaaacttgcatttgagttaaaaaaaaaaaacaaactattgtttttagtttaccatgcattggtaaatttcgaaagaggataagagctgggcaggaggatcacttgtgggtgggagttcgagaccagcctgggcaacatagcaagaccctatcttcaaaaaattaaaataacttcgttgggcgtaatggtgtatgcttgtagtcccaacactttggaaggttgaggtggggagatccttgagacttggagttcaagactagcctgggcaacacagcaagatcctgtgtctacaaaaatttttttaaaaacttagccagacatgatgatttgcacctgtagtctcagctacttgggaagcggaggtgggaagatcacttgagcccaggagtttgaggctgcagtgagccgtgatcgtggcactgcactccagctgggcaatagatcaagacctagactctaaatacataaataaaaataggataagagaaaaaatacttgactttgaaacctctattggaaaagctgcagaggtcatctgtaataaggcaaaggagagaatggagcagccacacctccgtcattgctgaaagccaaattctttctattgactccagaagaagacatattacgccagttttttaaagctgccatatgtcttatcagagtcacagttgagtagtggtatgtaggtctacggtacaaatacaaaaataagtgtttgagcaggtcacaacatgcccacacaccgtcaactgcatcttttctttggcagaggagtctggaattcacggctccaaggaaacaactgtttgtcaatccaaaccttggatgccgatactggtgggcggctcagtgatgacgttcctgtgtgactcaagtggtttctaaaaggcaagaagccatccccgtgaggcatacggtgaccagtgctgaatcttccaacaccatttcccacagggatcagttgcagtcaagagaatctgtttttttcagaggaggatgccctgtgtgagggaagagaggggtgagcagctgaaggaaggtgaatggacagaaaagctggacacactggccagactggggaggggggtgggggctcatgcctgtaatcccagcactttgggaggcccgggggacagatcgcttgagcccaggagtccaaggccagcctgggcaacatagtgagaccctgtctctacaaaaaaaatacaaaaagtagttgggtgtggtggtgcacacctgtagtcacagctactcaggaggctgagaggtgggaggatcacttgagcccaggatgtcaaggctgcaatgagctgagatcacgccactgcattccagcctgggcagcaaagggagacctggacttaaaaaaaaaagaaaaagaaaaagaaaaagttggacacggcaggccaaaagactgagttctacttgatcattgttgttgaatctgggagaagtggtatttggacccgaatgcctgagagcaagtataatactgccaacaggggctatgacttggctacaaatggctttaaactgaagttgccagtgtgtgccccctactctgtgtgtgccccctactctgaaacctctggcagcacctcatctttctgaggatgggcagggagcagggccgccgctaactccgtatctcagttgcccaacttgttccgaaaggccctcgacttttcgccttcaccttttcagtgatcagatacagaaattcatgtgacgaaaccaattgctgatgaaaagttcatttgccaaaggtcctcattatcctagaacagatagaatggcgataacaaaaaaggaattggagtgaatccacttaaaacaggaacccatattgcatatacagtgaaagaagatatgattggagctttgccttgagaattaaacaagcattacaaaaagtcagttttattttatatttcagaaaactaggttatagctgcaattatgcattgttcttaaaaatcagtgacgaatgagtcaagtgttgatgggggaaagctctgatgaaggcacgtgatgaaggcatgtgatgatattctatggatttcccgttggactgtcacagtgtaatcacaaagacagccactttattaattttccgaagagcatccgaatcctctgctattaaactcattctctttcatgtcagtatcctgtatccaccgatttctcttctacagttgttaacctgtctgaatcttgtctcattcacctgtcaatggctttgctcctgatacaagcaatcaatatggctttcacaggctgtgtataatctggcttcttctgcaatttcacttatggtagacctatcttatgtgtcttgcatcccactccattgctaggaagagactgagccctcagaatggtcacatggtaggcaaaatggctcccctattgggtcaggtacaaataaagctttgactataacctcaaattgtaatatatactgttcacatcactcttttttttttttttttttgagacggagtctcgctccgtcgcccaggctggagtgcagaggcgcagtctcagctcactgcaagctccgcctcccgggttcacgccattctcctgcctcagcctcccgagtagctgggactacaggtgcccgccaccacacccggctaatttttttgtatttttagtatagacagggtttcaccgtgttagccaggatggtctcaatcttttgacctcgtgatctgcctgcctcggcctcccaaagtgttgggattacaggcgtgagccaccacacccggcctgttcacatcattcttttgtcttttttattttttatttttttatagagatggggtcttgctatgttgcccaggctgatcttcacctcctgggctcaagccgtccactcaccttggcctcccaaagttctgggattataggtatgagccactgtgcccggccctcatcattcttttctaaacataattgaaattgccatattatatctgaaagatttattatactccaaataattttcttttttagacggagttttgcttttattgcccaggctggagtgcaatggcatggtctcagctcactgcaacctctgcctcccagattatcctgcctcagcctgctgagtagctgagattacaggcacatgccaccacgctgggctaatttttgtatttttagtagagacggggtttcaccatgttggccaggctggtctcgagctcctgacctcagatgatccgcctgcctcagcctcccaaagttctggggttacagacgtaagccactgtgtccgacctccaaaagatttttaaaagatgatttctcttttgattggcaagttatttgattatttaaaagatcctttttattgcattttggacaatgaaagtcctacttttttggaatatattaacttttctttattgcttaaggtaaaattcttttgtgtgtgaatgttctatcgatacttaaaaagaatgtatattatttgacctatacagcattaatgtattttctctattaaatcatgttgtatgttgttattcagatcttccttgtctattttaaaaaacagacttatgaagatataatttatatacaattcaatgatttaaggtatgcagttcaatgttttttggtgcattcacagagtcatgtagcaatcactgtattgtaatttagcctaacttaccaaagtctttgcagatttataacgacttagttccagtgaaatatagaatcctgaatagctccattatactcccttctaatgctattattatgcattatagtataatagtatttatgcatttttaatagcattcctgcattattattgtttatgctaatatgttatacatattattatacatattatgtttctatatgttaaaaacccaacaattctttggtatcattaatgcattaggtagtctgaagtcttttaaagaaactgagagaagaaaggagaaaaagtatatctacacagttgggcacggtggcacatgcctgtaatcccagcactttgggaggccaaggagagtggatggcttgagtccaggagttggagatcagcctgggcaacatagtgaaaccctgtctctacgaaaaatatgaaaattagccaggtgtggtggcacgtacgtctatagtcccagctacttgggagactgaggttggaggatcgcttgagcccaggaggtcaaggctgcactgagctgtgattgtaccactgcactcctgtctggtgacagagcaagaccctgtctcaaaagtatatctatagagttttaaaattttatttatttatttatttatttatttatttatttatttattgagatggagttttgctcttgacgcccaggctgcagtgcagtggtgggatctcggctcactgcaacctctgcctcctggattcaagagattctcatgcctcagcctcccaagtagctgggattacaggcacccaccatctcgcctggctaatttttgtgtttttagtaaaggtggggtttcaccttgttggccaggctgatctcgaacacctgacctcaggtgatccacccgcctcggcctcccaaagtaatgggattacagtgtgagccaccatgcccggccactaccttttaatttacccattccggttgtctttgtttattgctatagtttcagctaccatctcatgtcctttccttttcccagtatagctttgctctcaccttccatgtagcatcagtgtcaagtacactgtatttcagtagattatagccccaacaacacaattatatacacattgttctatgaaattactttataaatcagttaaaataagaaaggagaagaaggtcagacatggtggctcaaaccggtaatccctgcactttgggaggctaaggcaagaggttcacttgaggtcaagaattcgagaccagcctgggcaacatggtgagaccccatctctacaaatttttttttttttgagatggagtctcgctctgtcacccaggctggagtgcagtggcgtgatcttggctcactgcaagctccgcctctcaggttcatgccattctcctgcctcagcctcccaagtagctgggactataggcgcctgccaccacgcctggctcattttttgtatttttagaagagactggtttcaccgtattaaccaggatggtctggatctcttgatccacccacctcggcctcccagagtgctgggattacaggtgtgagccaccacacccggcctctacaaaatttttttaaaaaattagccaggtgtggtggtgcgcatctgtggtcccagctatttggaagggtgaggtgggaggattgcttgagcccaggaggttgagactgcagtgagccgtgtttgcaccaccacacttctgcttaggtgacagggttagaccctgtctcaaaaaaaagagagaagaaatatacaattatatactgtcttttgtaatttctacataatttcctttaccaatgttctttgtatgtgtgtattgtgtgtttgtgtatgttgtgtgtgtgtgcatgttcacattactgtctggagtcacttgctttctgcctgaacacttcttgtcaagcaggtgtgctatcaacaaattcaggttttgtttatctgggaatatctttatcttgccttcgtttttaagagagaattttgctggatataagatgcttgctagatgaaattttattttcagcactttgactgtatcaacccactgcctctggcttccattgtttctgatgaaaagactgctgttaatcttactgggaactctttacatgtgacatgttgtttgctcctgttgcttctaagatttttctttgtcttgcagcatctttaccgtaatatatctggatgtggatctctttgtttggcatacttggaatttgttgagcttcttggctgtgtagattaatgtttttcatcaaatatgagaagtttcaacctttgtttctttgagtacattgatgcttctgcctttcctctttacctgctaattcttctgtgtgtattttggtgcatataatggcatctcacatcttcctgaggctttgataatttttctttctgctcttcatttttttaattccctgtacttatgattggataatctatattgatctagcctcaatttcactgatttgctccggccagctcaaacctgctgttgaatctctctagtgaagttttaatttttttaaattttgcttttcaattctagaatttctatgggtttctgtttaaataattttgtctttttcttgatgttctctgtttgatgatatgttgttatcatcctttcttttagttctttaagcatggtttcctttagttctttaaggatgtttatagtagctgctttgaaggtttttatgctatttcaccatctgggctccctcaatttcatgtatttttaagtatttttctccctggcctgtcaaagaatgagaggtatattaaggtatcccactaaaaatgtgttttgtacatttttttcttcaggttcctaacttgcatttaaaaaattttgttgatgttagtaggtgtatagttttctattatggtattattaaatattgagcaggtataaattaacattcataaaataggagttaaatattaatggcataacaaatatctgagtttctacccattgcatttgagaaaacacattatcacaaattttttccctttttattttgaaaaatgaatttggaggatttatactaccagatgtcaaaccttattattatgtttaccatagcatattattatgctatcataaaagactgtgatattagcactagtgtagacagaccattgtaacaaaacagagagtctagaaataaatccacacatatatggccacttaatttataattaaggagacaaatgcagagtggtagacttgatgtatagaagctcatatattaatagtaaccccgtacgtgttatacatgttacaaatgttttctcccatttggtagtttattctttaaccctttaacttaaacctctacttttttcttaatagctgtagagtgtaataacaaagaaaaaaaactcttttttcttttggtcacacagagtttatttatttattatttttattttatttttttgagactgggtctcactctgtcactcaggctggaattcattggtgggattaccgctcactacagcctcgacctccccagggtcaggttatcctcccaccccagccttctgagtagtggggactacaggcacacgccactatccctggctactttttgtatttttttgtatagacagggttttactattttggccaggctgttcttgaactcctgggctcaagtgatctgcctgccttggcctcccaaagtgctgggattacaggcaggagccaccgtgcccggcctactttttaattttaggtggtcaaatatgttgcttgttcttttttggatcctaggtctcatgagatcattactagaactttctctaacccaagtttataaaaatatttccctctaatgatacaaaaagggctttttaaatacttagatcttaattttcattcagaacttattttcatgcacaatgcatggtaggtgtctaacaacagcaaattgtcactttaccatttattgactaagcctttcttcccccagtaacttagagggccaaatttttatcctgtacattcccacatgtaactgtctgtgctttggggctgtctgttctgttccactggtttatttgccaactcttgggccaatatcacattcttttaataaatataacttactactatatttagagttgtgctagaacagtgtctcttcatagtttttttccccaagcctttcaaatccagatgcactggcctaggccaggcaaagctcctaagtcagattccaagaaatatctttgatggtagtgttcctagaaacaaccacacaaatacactggacataattctatctccagccccatgctgccctgaagtctcactttttcgtggtcagctctttttttttttttttagatggagtctcactttttcacccaggctggagtgcagtggcatgatctctgctcactgcaaactccgcctcctgggttcaaatggttctcctgcctcagcctcccgagtagctgggattacaggtgcctgccaccacactgggataaattttgtatttttagtagagacagggtttcaccaagttggccaggctggtctcgaactcctgacctcaagtgatctgctggcctcggcctgtcgaagtcctgggattacaggtataagccaccatgactggcccagggtcagctcattctttctactattcttcttagctctcatttcacacttaactctctctgtaaatcaccatctctccatttcctcctccaggatgaactttccttctattttacagagcaaaacccatgatatagaaaccccttaactttctaatggcaaacctaaaaacttacacttagatccatctgtttctttccctattattaaaataagagtagagtcctgccctctctcttcctcctaagctaaagtaagctctattgagtgagatctggtttcctcccatacccttaggatacagctcggctctgtcctccctgtctgtgtttaaacatgcccgtccctcccactcgaacacacacatgttcacgcacacatctttaggctccagattctcctgcagccatcttgctatctcctctcgttcaaagctacacttctagaaaaagttgtctaactcattgtttcttctctcattcatttctcagcctactgcaagggccgctggtcacttccttactgttaaatctttactaatattcctgtctccagtcttgctctcctctaaactgtttctcaccatagaagccagaataatccttttaagatgcaaatttggatatatgattcccctccttaaaagctttcatgacttcttattgatctcaagatccagactccttgacaaggcctccgcctccagtcttctcaatcccatgagccctttccaatcctaaatcctggccacaccaagcctttccctgcccctggcttcctcactatgcgatcacctggtctttcattccgcacgtttgcctggctagctcctactcaccttcagtactccagcaagaagacgcgagtgaccaccctaccactccttcccccaccccaagaccacatgaaacacccctactttgtattctcccggcacccagcgcttattcccactacgtggaacattccttacactgtttacttctctctctctccaactagatggaagacactctgacaaacggggtcatttcttaattattatttaactccaacatttagccaagtgcctatcgcacagaagatggattatggctatccgaaatgaacgaatagctcctctattagccacagaactcagcatcacctgtgaccttttgttttaactaaagctattcactcattcgttcatcttattgcggtaaaaacacatatcataaaatgtaccatcttagccatttttaagtatacagctcagtagtgttaagtgtatttacattgttgtgaagcagaactccagaacgttttcatcttgcggaactgaaactctgcacccactaaatgattccccatctctctcctgctcccaggccctggtaacccccattctgctgcctctacgaatttgactgtgttaatacctcctatactgaaatcatttggtatttgtccttttatgcctggcttattttattcaacgtttatccaggttgtggcaagtgatgggatttccttcctttttaaggctgcatagtattccattgtgtgtatatactatattttatctgttcacctgtgaacatccgtgaacatcatatttttacctgtctgtgactttttatgatgattttctatagtatttagaattttggattttttgcaagtttctgattccacaacattcaaatatactattacaaagaatacatgcaaatatatgctttctataaatacaaagggctttttaaaatagaagcttttgttactatcataaagttgttcacactttttgaaataagaagctctttttgttcaaatgttttatattttaacatatatttcactgtatcagtccttttttttttctccacaaaaacactttttatttgaggcaaagagaagtcttgctgaagggattacagttccaagcagccaaaactcaactgttagtggcactattttgacctggtagatgttgcttctctttggtcagaaaagggtattcaggttgtactttccccagtggggcaaaaaggagggcaaagcaaactggaagagacttctactctattgacagggctcttcagatccaacatcaagctagacatgcccttgctggccactctacaggttgctgtcccactgctgagtgacacaggccatgctacatttgcaaggaaaaaaatgagacaggaaacacaggtataggtcacttagggatgagcaggcatccacagcttcaaaactcttcatggaaggggtaatccttgtgggaggcacagctcaccaaggcacagactctccaattcctgttgtagctgagtaaggcggtcatatcctggctgttcagttcaaagtcaaaaaccttaaagttgtcagcaatgagttctggtgtcacagacttggggatcacacccaaattcctctgcatggggaaccggatcaggacctgggctgtagttttattgtgcttggctgcaatcgccttgatcctgggatccctcaggagggaagggtcctcggggttgacccagggcctgctgggagtgccaacggggctataggcggtcaccacgatgcctttggactggcagtactggattaacttctcctgagtgaggtaagggtggcactcaatctggttaaccacaggcttatactttaagccaggtttgtttaagagcctctccacttggaggtggttgaagttggagatgccaatagctttcatcagccattcatccaccagctcttccatggctgcccatgtgtccagaatgttggtgtcactgggaaccacattacccaactcattcaatggaaaaattccctcccaggcttaaagccagtcggccaatgaataaggtagaggtccaggtagtccagcttcaggctgctgagggtcttctggcaggctcccttcaccaggcccttcccatggtatgtgcaccacagcttactaacgatgaagagctcctcacgctttaccacctgctccctgagcttctcctgaatggccacccccacctcattctcatgctagtacacgtgggcacagtcaatgtggcagtacccgacattgatggccacattcacggcctcagtcacccggcctggaggggacttccaggtgcccagccccaggatgggcatcttggtgccattgttgagcacaaggtggctggccatggctgctgcgctccctggaattgtttcatactgtcttgtgtgccttggaagacttatctcctgttctctgccatgctaaccagtgctatgtataaccctgcctagtacagggtggtgagggaggggtgcctgtctcttcagcacaaggctacttccactccccactcccagcaaaagctgatctgaccggaacaatgatcaaaagtaggaaaataacattggccaggtgcagtggctcatacctgtaatcccagcactttggaaggccgaggcaggaggactgtttgagcctgggagtttgagaccagcctgggcaacatagcaaaaccccgtctctacaaaaaatttaaaaattagccaggtgtggtggcacatgcctgtagccccagctacttgggtggtggaggtgagaggatcccttgagcccaggagagccaagattgccccactgcactccagcctgggcaacagagcaggaccctggctcaaacaaacaaacaaacaaaaccaaaaaacccaaacccaccaaaaaaaaaaagacaaaaaaaaattaaggaaaataacattgacataatactattaacagacttacagatccaatctgattattttctcgttttcccactgatgtcctttctgttccagaatccattctagcagcctatgggacattgttgtcatgtccccttcatctcctccactacagagcagtttctcagcctttcttcatttttcatgatgatatttttgaacagtactggcagctatttcatagaatgttcctcagcttgagtttctatgatatttcctcatgatcggattgagactgtgtatttggcaagaatgccacatgggagtgagactgtgcacttcttggtgcattgcagcagggggtccgtgatgtctccgtgttttattgctggtgatgtgaactgtgatcacttaggctaagatggtgtcttccaggtgcaccactgcgcccagctaatttttaaatacgttttgtagagaaaaggtcttgctatgttggccaggctggtctcaaactcctggcatcaagtgatcctcttgcctcggcctcccaaagtgctgggattacagatctgagccatcatccggcaactctctcactgtttctacccagttcccatatacctcttgtaggtaaccatctcattagcctctgatttattcttcctgtacttcttttgcagatatgatcccctgcccaagtttgatggtaaatcaacaggtgcagcagccaagacttgagaaggacatggtaatagagcatgcagatttctcagacatgaaggtgtgggtcaccccacaggtgaactacttagaccaggagaggtgtgctagccaagggtgagggaatctcgaatgggtagtaggggaggcagatgatgaaaaccagctatagccttgaggtcagctgtagcagtaggagctgctgttcatccttcatcccactagctgtcctcttggaggcttctccaggaaaggaggccatccagaatcccagagaagctgttcactgatgggattaacttactacgtgtaagtaagaagtggatccgagtgacgcaagaagtggattgcagtggaggtcattgtgtgcctcccagatcccacattcaggttggagggacccatttccccagctgtgttttctaaagtctcataggtacatagcacagtaatatgtatatacaacagagtcttgccaagcacaggggctcatgcctgtaatccccatttgtggggcttaggtgggaggatcacttgagcctaggaattcaggaccagcttggcaacatattgagaccctgtctttacaaaaaattgaaaaattagccaggcatggtggtccacaactgtagtcccagctactcaggagactgaaacaggagtctctcttaactcttcagcccaggaggtcaaagctgtagtagcaggccatgatggtgtcactgcactccagcctgagtgacagagcaagaccctgtctctaaagcacacacacacacacacacacacacacacacacacacacacacagagagagagagagaaagagagacaatcttctctataagaacaaagtatacacacaggccaggactgagactggagtttggggaatgggaaggatttggatatatggaattgggaggaaatggcccaccagatggcatatcagaatgaggcgggcatttccagcttttcttgatcatcctccacctccctctccctagaaggaagaatcctcctccttccctctcccacttccctctgccctagacacactccgatctcacaagccattctggctgctgcgacttttagttttatccgtcgtctagctgagattaaactggaatgttccatttgctcttttggctctcaagtaggctcagggcttcccacctatgggtgcagttggatctttttcactgtaacagaacaaatgctctgacctccaccacaaagtgtttctgagggtgcccggccttagtgagttcctgggcaccccccataatgtacccaggccattcatatttaaggcccccaaagtctcctgagggcttcagtggagcctctgcttcagctccttcttcttcttcttcacaaagttgatacccctatgccaagggcacggattcctgatttttacaagaatcacttcctagaggcatcaaagtggtttctgcattcactccagttcccacttggctgaaggcacaggggatcgttcacggaggtcggggggaaagtcactctctttgtaaggactacaaaacagcacttgtctctccccaaatcccagtttcttctgcacctcagttcccccccagaaacctctgcaaaggaaagacaacaaccccaccttcctcttccagccaaaaccccaacatttatgcaaatagactggcgactccacctgctaaacccaagtcaatatgaatcccagttgaggctgacacaggaactgattattaccgtgggaatctaaacgaaaaataagatgaaaaaggagcagtcacggcggcctaggagtggacgcagattcctgacgctaagcacagggattctaggccacaagcccacctggcctggctgtgtctccttggccctgtctcatctgttgggcaccagctcccccctgcccccttctccagccccttggcttggtcctcacaggactcccagaacttgggacagggcctggctcagagcaggaattcaatcaacatctattgactgagacagatgaaagagaataggagaatgagtgccagggacaaccatgtccctctgtctgggaagcttctcatttccttctcagctcagtcttgtggcttccaggggttgacctggtgtttggaccttcagcggaggatggggcttccccactagacccaaaaatggtgtcctgggcttctccgtcaccctgcagtctcaaagtggacccctccacctccccttccttctttctatccctctctcctcctggaggagctcctgtagatctactctccctctctgctccatttctctgcatgatttgggtttgcctggcagaagcacagtcaccgctcgtggactgagggagggagtggggcctgaggctcttctgctgctttcttctttacccatttggctaaaatctggcctgggttgttaatgttttaaaacagtactgttttaggttaatgttaagactgcaatgcatcccaaatacttaaaaaaatttctcagaactattttatttttaattaattattgtaagagatagggtctcggtctgttgcccaggttggagtgggatggcactatcgcagctcactgtagcctcgaccttctaggctcaagccaccctcccgcctcagtcttccaagtagctgggaccacaggcacacgcccatgctcggctaatttttaatttttttttgtagagatggggcctcactatgttggccaggctggtctcaaacttgacctcaagcaatcctcccacctcagcctcccaaagtgctaggattacaggcactgtgcatgactcaaaacaacttaagatttataaaaaattgagaaggaggtatagatttcccagtttcacctattactaacaccttacattcatatatttgttatagttaacgaagatatattgatacattatcattaattgaagtccattattaaatattgcccgtacttcaaatctggatttccttagtttctaatatcctctttctgtttcaggatcccatctaggataccacatcacatttagtcatcatgtctctttaggatcctctagaccaggtgtccctatttcctgagccacagacccattagcaaccgggctgcccagcaggagatgagtggcaggtgagcaaaagttactgcctgaactctgcctcctgtcttatcagcagcggcattagactcgcacaggagcacaaaccctatcgtgaactgtgcatacaagggatccaggttgcacgctccttataagactctaatgcctgatgatctgaggtaggacagttgcatcccgaaatgatctctcctcccctcctgctccctatctgtggaaaaactgtcgtccatgaaattggtccctcttgccaaaaagattggggactgctgctctagactgtgatactttgtctgactttccttgttttgatgatcttgacggttttgcgaagtcttaggtaggtattttacaaaatgctgctctattggaatttggtgtttttcttagactggggttatgagttctcaggaggaagaccaaagggtaaagggccattttcatcttatcttatcaaggatacttgctatcaacacggtttatgactgctgatgtggacttcgatcacctgctagtctttgtcaggtttctgcaccataaagttactctttcttctcctccatattctacgcttcgaaaggaagtcactgtgtagcccacagttaagaatcagggagtgtagctctccagcctgagggcagactatcaattattttgagttctgcatgggagatttgcctcttctctgtcatttatacatttattccatcatttattaacatccgtagggactcatggatattcatctcatactttgggttataatccaatactacgttatttgttttgccactcaaatagttccagctttgggcactgggggcactttcatttggctcctgtggccctttgatatagtcttatggatggaatgtttatgtctccccaaattcatatgttgaagccctgccccacatgtgatgatatttggagatggggtctttgggaggtaatcaaggttaagatgaggtcatggggtggggcactcgggatgggattagtacccttatatgaagacatgctggagaattcggtctctccccacacagactccccaacaagtgcacaaagaagagatcatgtgagcacacggggatattgcagctacctccatgccaagaaaagaggcttcagagtaaaatttacctcgccagcaccttgatcttggacttcccagcctccggaccatgagaaacaaagttgtgttgtttacgccctcaagtctatggtattttgtcatggcagcctcagctgactgagacacacctccccaattgcttcactttctgaggacttccttactttctggcactgcaagatgttccaggctcaccttgtatatttcctgccccagccctagaatcagccacttctgtaaggagccggctcctgttattggagaatagtattggaaaccaacaacaggctcctaggtagcaaattattcttggatggacacactagaaaacagttattttgtgcctcctatgtgccaggcactatgctagctccttttcatgttggtttacttaatcctcataacaattctatgaaatatttactgtcaatcctccccagatgaggactggaggtgtagctgggttgagtgctagccaacaccactctgttctgtctccaaagcccatcacactgccttgataaagactggtgtcacatacctcacaaacaccatgttttttttttttttttttttttgagacagattctcgctctgtcacccaggctggagtgcagtggcgctatctcagctcactgcaacctctgcctcctgggttcacgccattctcctgcctcagcctcccaagtagctgggattacaggcgtgtgtcaccatgccgggctaatttttgtatttttagtagagatggggttttgccatgttgcccaggctggtctcgaattcctggcctcaagtgatcccagatggcacacatctctccttatgtgcaaagatgacagccacctgtgtgtgcacagatgcatgcagctctcctcatgtgtgcaggtgatatgtacctatttgcatgtgctcacatacctttgtgtgcagagatgacatgtacttatccttaagacagatgatgtgtctcaactcatggaataatgaaatctgacaaactgaaaagtgctttagaatggacattcacagtacttgccaactgctcaagcttagaccgtgtcagattttttgctatcatccataggactcccttatgagatgtgggtatgttctaagacaaacacttagcatcacagctgttaggatttcaaacagtgcttccagagataaaactggaggtttacattttgccctcaagcatggggatcatatcacacaagaaagaacagattagtcagccagggtgagtaaggcttccatcagagcgaccacagtgtgatctgccacttgaaatgcctattgatgggtttgtctgcccagcacttctttttcctccgagatcagcccctgccaacctctccagagcagccatgttcatccatcatgacctgcttttaacacttgatcattcctagatgagcacgtgacccagctgtgccaatccaagagtccttgcctaggactgttggaacaggaacttaaaatgagagttggcccttctttagggactgaagctgtgaacactgagattgtcattggccgtgtgaagaaggtttatgtgccagcagaaagcataatgaaatcaacaggaagacacatacacacttacacacacacacatacacacagagagagagagagagagagagacaaagacatctgttcttggttctgacatgacctgggtatttcatggagtggcctagcatctttcaccaagggcttgcttaatgcttaggctagtcagggatggttttcacttacttccaaccaaagagcctttaccaatgcagaatgattgataatcatattatcaccaacatactgcaagacatcaactgaaactcaaatctgacggacattttcccagctctcaaatattacagatacagtctggatctcctgtcaaaggtggttaacttggctgtttagtttttcagaaactttccaaatatacattaatttatttcagtttgcatagtaaacttctattgatctggctttcaaatacaaaaaaatcaaattactaaattgttcctccactctaccttgtggaaacaaatgaaataaggtgtggtaactaaggaactgctctaaaaataacaccttttaggatacaacatagggtcaacatcatgaccttcaatattttgtgtgtttagtgcctgaatcagcaaagcagtataagcacagcttggcctcattttgcagtgtgttttagtctactatgattctatggatgcaatttgtttataattcatgtatgagcatcgtggtaataatagctaatactttttttattttttgagactgagtctcgcttggtttcccaggccgatctaggctcactgcaatctctgcctcccgggctcatgtgatcctcccacctcagcctcctgagtagctgggaccataggcacatgccacccatcacacccagtactttgggagaccgaggtgggagaatcataagcccaggagtttgagactggccgggacaacatagtgagactccatctctaaaaatatttcatctctcaaaaaattttaaaaataaaccaggtgtggtgatgcacgtctgtagtcctaactacttgggaggctgaggtgggaggactgcatgagcccaggagttcaaggctgcagtgagctatgctcatgccattgcactccagctttagcctcccaaagtggtgggattacaggagtgagccactctagccagccatgtagctaatacttttgaggtaccaagcaggcactgttttaggggtctagcacactaattcctttaatcctcagagcgacactgttgtcttctccatttacagatgacagagaggttaagtaatttggccaaggctgcacatctagcaagcggtgaagctgtggacactagtgttcatatctcttaggtaactaatgtagttaatcatagtggctgtcaggtaactacaatattcaatgaatacaacagcctacttcccaagtcctttggagggtttttttattttaaatttttttaaattaaatagagatgaggggtctcactatgttgcccaagctggtcttgaactcctggcttcaagtgatcctctcacctcggcctcccaaagtgctatagaggctactcagtctttggatttgtagaatatatattgattactgtaaggcagagagatatgcaggaaatttttcttttactgtgatggcttggatccctgtgacttgtaaaaaaagctacatagtagacctccaaggcttcaccaggctctcgtttccttatggagaacaaatctttcggaagcttctatctcttagggtaaaaatctgaatgtttcttgggcccacatggccctgcctatcttgttggtctccactttactttcagccactttagccttaaatttctcccatcacagggccccggacaagaattccctgtgactgctgcacccacgtcctctgtattgcctagccaaatcctgtcaatttttcaggcttccccggacccatcagactaggtctggttcgcttctgatttctcacagcgtcttgtactgctttcttgtagtatctatgaaaatggtaattgaaaaattgtggaccaggggaggtagctcatgcctgtaatcctagcactttaaaaggccgaggtgggtgcatcacttgacctcagctgttcgaaaccagcctgggcaacatggtgaaaccctattgctacaaaaaatacaaaaattagccaagcatggtggcgcatgccttgtagtcccagttgcttgggaggctgaggtgggaggatcacctgagcccaggaggtccaggctgcagtgagccatgcttgccccactgcactccagcataggtgacagaaagaaaaattgtgtaattaccaaacgcctgtctgcctggctgtaagtgtaagttccatgtgggcagtgactgtgtgtttgtcttgctcattgctgaatctccaacacttagcctacggcttagtacatagttggcaccaaatgcatacttgtaaactgagtagaagaaaaactaccagctaccagctgaaaagaaaataaatacccgagtgtcctgggcactgactagacttgctgggtgtgtaagaaggcctgcccagacacagatacaaagaatgctggaacagcttggcagggcggtttgcaaaccaaaggataactgaatatacctatgcaagttcttttttttccccttacacatttttcttttttcttttctttccttttttatttttatttttttatttttgagatggagtcttgctgtcacccaggctggagtgcagtggcgtgatctcagctcactgccaacatttgcctcccgagttcaagcaattcttctgcctcaggctcccgagtggctgggattacaggcacccgccaccacgcctggctaatttttatatttttagtagagacagggttccaccatgttggccagggtggtctcaaactcctgacctcaggtgatccgcctgcctcggcctcccaaagtgctgggattacaggcgtgagccactgtgtctggcccccttacacattttttaagtgattaggaaatattcagggtaaaattatgattttgtgagcaataaatcacaatcctattttaatagtactaaaatcttgatcaaagcaagttcaggcaggacttggttactcacacccttaatcccagcaatctgggaggccgagacagaaagatcacttgagcccaggagtttgagaccagagtggacaatatggtgagaccttgtctctacaaaacatttttaaaaaattagctaggtgtggtggtgcatgcctgtaatcccacctacttgggaggctgaggtgggaggatggcttgagcccaggaagtcgaggctgcagtgagctgtgatcaagctgtggcagtgccattgcactccagctggggcaacacagcaagatcgtctcaaaaaaaaagaagaaaagaaatttaagctgagaatactgagagccaacgtgaagaaacacacttgtttcaatgacacttattctcctaagtgtgcatctgtgagcattattacctgtttttttttttttggagacagggatctcattctgtggctcaggctggagtgcagtggctcaatctcagctcactgcaacctccgcctctcaggctcaagccatcctcccatctcagactccagagtagctgggaccacaggcacagcgccaccacacccggctaatcttctgtatttttggtagagatggggtttttccatgttgcccaggctggtctctaattcccgacctgaagtgatcagcctgcctcggcctcgcagagtgctgggattacagacctgagccaccgcgcccagcccattgttcaccgttgtgaccccttttaatttttatttattgctttatcatcttactgattcctcgaaacaatcttacggggcgagccggttccatgggcgctgaagaaacatttcctctttcaaagcctcaattgtttgaacgatacgcgttgctaaagaggaagcaattaaacctatcaggcgagttctgccctccgcccagcgagctgctgcttcctggtgttaaaacgctttcggggccaggcgcggtggctcacgcctgtaatcccagcactttgggaggccgaggcgggcggatcacgaggtcagaagatcgagaccatcccggctaaaacggtgaaaccccgtctctactaaaaaaatacaaaaaattagccgggcgtagtggcgggcgcctgtagtcccagctacttgggaggctgaggcaggagaatggcgtgaacccgggaggcggagcttgcagtgagccgagattgcgccactgcactccagcctgggcgacagagcgagactccgtctcaaaaaaaaaaaaaaaaaaaacgctttcgggttctcctggcgagttttaagtcacactggatcgctgcttattttcagagatcacctcgcacccatgcacctggaaggcacccaaagagaatcattttaagaaattcacttcatctcaccctaacaacaaagcacagcctgcagcacatggatttcacccatgtgacatcaatgctaatcctatgtgtgaaacatctgggttcattcgattttttaaaaattagtaactgagatggggtctcgctatgttgtccaggctggttctccaacgcctgggctcaagccattctcccgcctcggcctccctcggcgctgagattataggcgggagccaccgcgtcagcctccactctttttgcggcgacaaagcccgcccgcctgcggggcgttccgttcgcagaaactctgtgagggacgccgcgggggcttccaagggacgcggcgaaaccaaaacagtcgccggtggttcacaaaaccacctcagaaaatgcttccaaaggcacgtctggcctccacaaggtgacggcttttcagcctccgactcgaacttgagtcgtccacagcactaggccgccgccagcccgggcgagctgcctagggaccgcggacgccgcagcaagcagctccctgctcccgccacacccgccgagccagccgcgcggaacccactcccccaccgtgggcccgcctcccgccgccagcctgcccacgattggtcgactgggctgcccgtcgcgagagaaggcggtgcctccggcaggccggcgctcccattggccgggatggcggcggcggcgcgcgcggccccggcgagcaggggaagccggtggccgcggctgcggaacgggcggaggctgccggtttcgtaaccgtcgctcctcctcgctgactcgcgggctgtgaggcctgggtcggctcgggccgcaccgcgcggggccgctcggagtggaggccgcctgggggcaggcgggctagaggagcaggtaaggaggctgcggcgggcgccctgagaacggggaggaggaggccgcggcgacgccggccgctcgactgggtgcgggcccggctcggggaaacccagccccggccccagacggcccgctggcccgggaaggccacgcgaggctggaggcgcgggcggcggcgccgcgcggcgtctgatgcaacctgccggcaacacccggcggggacgctgagctcattcctggccgcggcccagcgctgcggcgccgcccgtcgacccccgcgctgcccggggcgcccctcgcggcgggccgggagcgcgcgaacggccggggaatgccccctgcggagcccggccccctctcggtgaaacgggcgctgtgacccgccaggctcgcattggcccctggggatgaagggtgttcccagaatagcagaaggtggaccgagtcgagctttagaatcctgatcttctagaagggctcagcttgcggtgatcgaaaatctgttcagaagttcaaagactgatcaataaaatagggaaagcaactggtttttaaatgcatgactttgcagagataatattttgcttctttgtggagctgttggaatgtcctgcactttactgttgaacgtagtttagaagaacacgcaacacctacgggtcgaatagagaagaaatgaagcacttcgcaggcatagttggagggagcggagcagggccgacagccagcggaggtgaccagatgcgaaggatggaaatgcatgtgtcgcggggggaggagagtgttttccagggcagctggtgtgttgcttctcttccgcaggtttacgtgttgggttttcctcttgtttgaagtttatactgtaatctggcatcctgaaatgtataagatttagaaaggtctcaatgttgatgggtgacaccaaaattggtagttgtgtcagaattgactgcttatatgaataggttgtcacttaaggcagacttctcccaaagaaatgtgactcccagagaaaattttaaaagaaaatcctataagggcttgctttacgaagacattctacacctagaagctcttgatatttaagatgtggtcatctgttagcccttgagtagtatttgggataagctgttcataaggtcgattctgcttctggaaaaagttgctgtaaacaaggctaaataattacagggtacaagggagctgaagcatatttcagcttcttgattcctgcttttggtgggcacacttggctggttcagttatttttaatacctgcttttaaaaaaagtagatggaaacaaaacttcattgagaatatcctttaaattctcaagatcacatcatgtctgtctgcaaggctgtctgatcttggagagatggtttcatccctgggaaattaaacactatgtgctgagcccctggtaaagacaaataggacctcgtggggctgaatttggtctcgtggtctaagattgcctcacttggtcacagtaatggtaaatacaggtagccacgattccagctgtattgtgcgttcttgggagggttggttccatgggttgttatattgataggtacactggcctcctgcgtttgtggctttctagctctatcagtaaaaaaaagacaaaaatgagcatgacctcctaatggatgttcatttacaaatagtctatttgttttgtgtgttgtaaatcacttcaaaaggattgggttagaaagatgatgttgatgttcttctaatgctccagtgacccacttctgtactcccagaaaggggacgtccccttcctcatggaccctgcgctagatgcttgtgaagatctgcagggagacacgatgcggctggagttgacagacctagggaacaaattttcccagatgcccaaagaaaagagaaagcacagaccatttaggatacagatagtggtttagtactgtcaagatgtggtgtgagggaggagagagggtcaggaccttggatttgatcctgtagactggagccagagatgaattttcaccaggagaatgactcactcaggtttgagtgttcaattgctctggagacagaggttggaggaagcaggctagaccagagaccagtgtccctgagagatgatagtggcctaaggtgatttcgatgggattgggatggagaggaagagtagatgggaagttttttttttgtttgttttaggtggaattgtcaaatcccagagactaaacagagttaggaccaaggagaaacatctgtgactattttgaaatgttgaccttcattgaggaaatcgagtgaaaaatttattttggtgggcaaggggaggaatattgggttctaggtctgtggagaaaagggacaaaagggttaggaaaattcttgataggtttattttcccaggtgaaacttgagaaaaatttgattttgttttactcattctaacattctgcgctttcagtgtgactgacgtgaatgaacattacttgaattaagtttgaattaaaacaaagcctattacccacttagtccaccattctcaatattcattgggaatcagcagcagaggccctcagacttcagtgtattcagagttacttggaggtctccttatgaaaagattactcagctctgttcttagaactcctgattctaagtctggggcagcctgagaagttacatttctaaagagttcctggatgatgatgatgctggtccagggaccacactttgagaaccactgctcttcagctttcctgctgtttcctccttgagtgattcacatggaaggaagccaggcgccgccctgcatcctgtagcctgaactttggaatagtgtttgtccacagaggagccagacttgaatttaggactgagtgtccagctttcaaataaacactttttgcctgttgtaggtgttcagtaaatgtgtgtggaggaacaaagcgtaaatgagagtggccttttcagtgtaaaatcacttagctctttgatccccttttacttggttaatcttcactttaagagctatttatatggttaaagaacttactaaacaaaacattcttggagttattttgattatctccaagtttctctttcttacattttcaccagtttgtaggttcagtgaatactcttttcaggccaaagggcttacctttaaaacctcacctaccacacacgttcagcctagtaccttgcaagatgagtcaggcagaggtgaaaaagcccttccctgttcctgtatctttggatacggaaacaggcgtgaacgttgctgaacgtggaccctgtagtgagtaagagctgtttgttagtgactgaaggtcgtggtgtgttgtctgtaggaaagtgtcttactattccacatccctcatttgcatgtggggaacagacagccatggaagaaaagagatttgcccaaactaaaatagggggagccacagccaagacaagaactggcctggtcactggtctctaccgctttggatcattgctatctctgagcatggacaagttgactgtagagagctttaaaggctaaaaatataattggtatattaaaaaaaaagtagagaaataaggtgaacatgattatgattgttaagacagtctcaggggaggtgttaaacaagttcttaaaaattgagtaaagcacctctcacttgacaccaaatggataataataatgttaggtggcactaaatgtggctcagattaatactaaacagccacttttctactggaagaaaaatgaggcaacctaatgatgaccaagggaaattgtgaactgtccattactgaagataggcttggagtggatcgccctcatggtttggagggatgctttttgtcttgccttagtgttggcgtgagaacagatgacctactagctcagagtcggctgtgtggctttgaaaacaatggaaagtaatgacacatggacttttcaaagcaaagatgttttttaaaaagagaccaataaacagtgtacagaattgcctggctgaaggtttgggtgtagctactggtgtttgctaactgagctttccctcattgtgggatcactgcataaatctgactccagattttttccactgatgtgattttagcagttttgtgaaaagagaacaggatagttttatgttcctaacactgctttctaaatttctaagagtgccctgattccttggtggacaccgttcactgaacttagtttgtcttgaagtggcctcatgttgataggatagtcacacttttacacttcttggggcagctgtagggacttaattggattcagagtaatccacatgtgactgcttttcgaaaccgtgccttcatttctgcaggcagcagcacagggatgcttcagagctggtgcgtcctccgagctcacacgagctcatttggtagcacgaagtggccacaggcacggcagctgctcagctcctttgtccagcctgggtcccaggacccgcacttccttggatgcatcatgagggcttctgtttctttccttgtggtttcaggttgagtgtgttttgagttttactaattatgtcaagaagaaaaaacacactttttacaagcttggtgggatggggagcaaattgagtgtcagagctcctaaattcaagaaactgactcagtaaatttggttaaactgtggaattatcatttgaggtcattaaaaaaataaagcaaaaaactaccttttcaaaatatccgatgaagagagctctgggagagaactcaagtcctcgatgactccctctctgcatattagaacatggaacccgcaggggtgatagcatgagagcgctggagacagggtgcgcaaccccagccttctgttttgacttgaaccaacaatggaaacttttcccccctttcattgcaggtgtctctcctactacagtcagctgcagctcctccctgggagattgtcaagtgctgttagttcacatgcgccacctaattagtggaagtcttttgttttcctcccatttttgataacaatcgcagaggggcagtgccctcagggatccaggtgggctgagtttcgcctgatggtgcttctgtgcttacttacctttctaagtgaaatgatttagacttcagaaacattggaacagttggcagttgctgtagacttttctcagcagaatcaattaatgttggcctgatgttaggtacgtacaagtttgatctcatttgatcctgtcatttcaaatattttaatgcaatttattttttaactaggtacatgtgaagattttttggcagcttagcgtggaaaccattgatcaccctgctctcatttctacctgttctgtgttggcaagggagagtgcccaaatgagcaagatatcgcagcaaaacagcactccaggggtgaacggaattagtgttatccatacccaggcacatgccagcggcttacagcaggttcctcagctggtgcctgctggccctgggggaggaggcaaagctgtggctcccagcaagcagagcaaaaagagttcgcccatggatcgaaacagtgacgagtatcggcaacgccgagagaggaacaacatggctgtgaaaaagagccggttgaaaagcaagcagaaagcacaagacacactgcagagagtcaatcagctcaaagaagagaatgaacggttggaagcaaaaatcaaattgctgaccaaggaattaagtgtactcaaagatttgtttcttgagcatgcacacaaccttgcagacaacgtacagtccattagcactgaaaatacgacagcagatggcgacaatgcaggacagtagacctcaccctttccagactttagagcttgtggcttgaatgttaaaggtgtgaccaccgacaccactcatgtcaatggctgaaagttgtccatttccatgactcaaagacccattggaggctattttctgggatcagcactgaagagttgattagctaaaaatgttagccttgtaattcgaatatctggttttaaatgatagaggtttttgtgggaatcaaaatcccccaaatgttaaggtatatggtaaaaaaagaaatatctgggatcccgatgttcttaataaatcctgacttcccaagaaatgcttcttttttaagttgacaaaaggaatggggaactggcaggccgcgcagaaggttcttggttttaatggataggctgaattggattaagaaaagttgaatgccacctatggtaatctatttgtgattttcttctaaattatgtattataaattcgtagagctatagaaagcaatgagtgtgtaatttggagtgattttatatatggcataaactttgttttaacataattagtactgttttcccccaaaagtacaagtttttgagtagcaatgtcaggttaagtaaagaaacttcatcacatcttataggtagtgtgtggccaattgacttaaaaaatacaaataacatttaggaagcaaatagattaaacacaaaaataaaactaaagcataggaattatgtttttgagatacctttgggcttagattggcattgttttattctaaaaacccaactcagtggtgtagagaaacttgtgtaccaaaattttagtttctgcagatgctagtgtttttttggatacaattttgacaaccaagttagtaaacaaaatatcttaacagtttgatgacacaagctactgatgagggtttggaatattaattcagaaggtagtttctcttgtgttcaaaatagctgccatggggctgttacttttaaagtcaaaattttcttctgaaggctcattttggtatttgatcttaaccaagtgattattagagaaatgtatcaactccatgccatctcccaaaataattgtctaagaaaacttgaaagtgtaaggttttaacctttaatttatttctcttaaatacatcttttgatattgttgttgtgacatttctttttctggttagtgggctttccagactttgtaccactgcttctgtttattcatttatatgcttttgtgtcccataaattatttcagaaaatgctgataaaactcaggatattgacatttttgttgagactaaaaaatggcagtcgctaaagtagggactctagagtctggcttacgtcagtgttggtagtttagattgtctttgtcaacgttttttcttctctcttttgctttcttttctttctctttttttcttagcacagttctagctcaaatttgtgtattttttgtgtgcctgggctggagatgagagactgagtcataactgatttaaaagtttgtgttatcaggtatcttatttgaacatggtcatttttggccacattgctgtttcatactaggacttgggatgatgtagccagaataaaactcaagttgcaccctccggttggtggaagattgctgaccgtgccgtttctgggcaggagaagacatcatggtgtccagcaactcagcaaagccattcttaagagtcgtgaggtccttctgaatgtaaaactggagcccaggagaagctgtcccaggagggctgttaactccctatagagccaggagacaggataggggtttctagggtccaacaccagcttaccttggagtatgaatctacccatgaaggatgagagatgttttgaaaaactagccaggacacacccacaggatcctactggctccttagcagctgattggtgttacataattaacttaattggagatgcattaggtcacttgaatgtataagcaagcacctatggtaggcgctacagacatttaaatctcttgggaattcgatgctcccatggaatttataccagttatatgaattgacttaagtatcttgaaaaagaaactttagagaaagcatcaggggtgtgtactcagtatttcaaatcagaacacaagattggaacttttggaaaaatgggttcaagctttcctattagccatggaaatgcaaagtttagcagaagcaagcaattaggcagagaacaaaaatgttaagcatggtgttgtctatcttattgaagtggttggaaatgaaagcttttaatttgatagatttatcagtataaaattagggaaaccacgtgtggggaatgaatcaatttagagcttcgggaattgtgaggtgacttttgtaacttttgttctgtgtgtgacctgtgaaccactaggatgtgatctgcccttgtgggcaggtccagcatagttaggagttaggctttagcataaatttctagctgcatctgagtctcctgggatgggtgctctttggctggttttggctgcggatggtgagatcagagcagctcttcctgctgctggcccctgcaatcagttgttgggatgccagtgcagatcactaagtagtaagattttaatcaaacacgaccaggtccgaaatgcaggtcatgagtgtgaaattctcaaatttacataaaaagtagaagtatagacagtttaacatttggtattaaaggagaggaaattgtagcagcttttcacgtttcccagtccccattagagggcttgagaccttgtacctgaacaacccattttgcactcagtgctttctgatgccttaggagaattgttttgtttcacaaaagctgggaaggaagaagtccattctgcagctgttagatctgcctctcaggaaaaagtactaacttgttctttttgttcctggctttcatcagtttgtgagatttctctattttttttaaatataattttatttctttcaacaaatataaaataaaaaacaactttggaacaatgacttgtctttcatcgtggctttctttatattagataccaaaaagcagtccagatgttaaacagctgggaagcccaggcaggtgccttgctgtctttcctgttcccacactggacggctgggggtaggggtggggaaagtggggagacaggcagaggtatttgtgtccaagtctagatctccccgtttgcccttagtggataggaaaatagttttctctgaacatgggatacatctttagttatatttttagtcacttggtctaaactaaaaattataccagaatagggaaaggaataactgaataaatgggttcccgcttaatcacctagtgtctcagaacatggtttccatttagagagggaagaaattcttatgtttcgagatagatagtcaagaatttaaagtaaggcctttccccatctggagttttgtagtacatgtggacactgtcctcatttacgtcatagagtgtctgtagagatgaatttgctgatttcataaactgttgagtccagggagctgatgtgaattgaatatttcaagggaatgccatttaaatgcttttcttctctgatgcctcaattattttcatgtcttgggaaataaatctctgcttgctgcatcttaatgaaaagtggaggtcaggaattatttctatgggaagtgtggcccgtttcacttttttgaattagttgtgatttagaatccaataacgtgtcttggggaattttaccgagtgatgacatctttgtgaggggggccggtctttttctgacaaaagcacttttagaccagctcatccactgcctgtgcctagccagagagttcataagcgttttacagttttacatacattcagagaacaccattgcctaggtattcttttactgcagtatcccactcctcacagagctctaggcctgaaagctgtatagaggcatctagagaaatgggggttatagaattggacttggaaaaggaataggattgtcagtgaaacagtcacgcgttacactttttgcagcccaaacgccacctcttgtccctccctgtaaagaagctgttaaaaccagatgcgcttccacatcgccacctttcacttccaccttctaaatggagctccggtacctgtctgcttcacccaccccgacccccatgcagagccatcctcttcgcttgcctggacttggtgactggctcctcgttggtgttcctggatggcagcgtcactgcctgctctccagaaccatctgttgctccccattgcacccggggtgagactcagtctccttgtgtcgtggcgtttcccctcatcaacttaatttccctccatcctcctgtgtcactctacttcggctctagggcttttccaagctcttttctgcccttcctgggacagctccttctgtctggaatgaagcatctcctctggcttttcactaacaagttccctctctgtctcagccccctggctgtctacgctaagcctatcctgttgcttgcttcatggcactttgcagtgtttgagacaatatatttgttcatgctggtttgaggtgaaggcctcgcagcagactagaggctctggaaggaggggtcatgtttgtatcctgcactggcagagtagatgctcaattatgtattgaatgaatacctagacactgagtttcagaagggttgtagcacactatacagctttctggcggggtctctaatggatttctgaagctacatgaatttctgcagaggttagaagagacagagttaggtacaaacatgggggtagcggaggtagctactggggccctctagacctgtgcttccaaagaatgccctttgagacaggtggagactcacgcctgtaatcctagcactttgggaggccaaggcaggaggattgcttgaggccgggagttccaagaccaacttggccaacatagcaaactcctgtctctatttattaaaaaaaaaattttttttttaaagagcaccctttgacctactggctcaggaaaaacgtgacctctctgttcctagtgaccctctgaaaagtgtttagatagaaataagagatttctccttgctcctttttgttcacttcttgataatcagagatgtttatgtggaacgggcagctttggtatggaatgtctgaaaggaaggagaaagatgtatggtgcactcagctctgtttctcaattaacagaactaaactgtccattttgagcttcatcctgactttgagtggttttatcctgaaagtggtggaaattaaagccctgtacaccagactgtgtctgtcacaggggaacaggggtggagaagtgcttggtgaactcttcaactttccttacactcagaagatactttttttttttttttttttttttttttaagagacagggtcttgctctgttgcccaggctggagcgcagtggtgcgatcatagttcactgcagccttgaactgggctcaagcgattctcccaccttagcctccagggtaggtgggactataggcgtgtgccaccacgcccagctagttttttatttttactttttttaagagacgggatctccctatgttggcccaggctggtcttgaactcccagcctcagacgatccttcagccttggcctcccaaggcatgagccactgcgcctggctaaaaagacataattgctactgctcaatgtcacagatggatagcttagggaatgtatctgtaccagcagaaaaccttaaagaatggatgttataaatctaagaagcagataagataaatggtgatttggaactgaaattggcttttattttaatgtgaccactttataagcacttctgtgttattaccataggaagaaatcagtttgtattaaactctttggtgacttttttttttttaaaaaggcagtcttgctttgttgcccagggtggagtgcagtagcatgatcttggctcaccgcaacctctgcctcctgggttcaagagattctcctgcctcagcctccggagtagctcggattacaggtgtgtgccactacgcccagctaattttggcatttttaatagagatgaagttttgccatgttggccaggcaggtctcaaactcctgacctcaagtgatcaaagtgctggaattacaggcgtgagccactgtgctggcctttggtgacttctgaaaacgtctcttaagctacagttttccaccccctcatcctcatggtttcatctgtggcatccttctcacttgtcatctttcaccttggcttgggaactcttggatgggagctctgtgagaaggcaaacctggaatggtgtacagaattctagaaaccagctccaggggtgggctgttctgcgggaccctgggagaactggacaagcagaggcaaggacagatacttcaccaggcatggctgggccctggctggcttcctgcctggtagaatttgttcaaggactacacttagggaggacaagcggtctctgcaaattggctgtggcgctgccttcgttggcagtgtctccgacagatgctggctttggctagtgtgtcccacatgaaaaagaaatcaaggacaagagatccctgcaagtctcaggttttaaatatctgcagctcaagcgctacatgattctaccaccttcagaaatctagtttggaggcagtgaccgtatcagaaagacttgtgttaaatcagtccgccctttaacttgcgcaaaggcatggcgcggggtgacttggccagtctgacctgagtgcctaggatcttcctgcagcgttgcttgccccacctcaaacctcgggctgcgctggtactgacaagctaaaaccaccttgcctaggagtacttctcacacttgtctgtcaggagcatctggcgggcgcttgtgaaatacacaattcctgggccattgcccctagacgttgggtcagatggtctgtgggggtcccaggaatctcttaccaaatgccccagtggttctgatgcctgttaggcttgggaaaccttgcagcaagtgacagggtgacaccagagccccgagtcccaggggctcaaagcaggctcctcggggaggactctgcccttgtcccgccaggccagtctgaggcagaagcagccgttagagggcctgtgctgccagcaccatcttcctggaactgacttgatactgacaccaggtgagccatcttttcagggtgcacggggtcccaaatgctcatctgcaaaggaataaaggggaagccacgcacaaaggaccattttaggaaaccttttattgcaaatgccattctgcatattgatttttgacagaaagtatcagaaatgcttctttcctgggaaaaggaatataaatgacagcaagacacattttagttgctactaaagaacagcattattttcaatcattttaagtcgctcatttaataagcaaggtataaaacagattaaaggtgggagcctgcaaaagggtaattaaaaaagtgtttcctccccgggaaacagcactgtttggtctgatcaaatgccgaagctgggatctgattctgggtgccgtctctcgctactggagtgctgaccagcaggctgcccatcacgaaaagaggttgcaaggccaggcccccaggtgcgctgggatttctggctggctctacttggggccagagaagggggtaaaggccttgtcacagcctgccatgcatgcttcaatctcttccacagtgcggggcacgcaggtcagcagctctatgccgctgtcagtcaccacgacgtcctcctcgatgcggacctgggtcaagccgacagacacacattatcatagagcagcctcatgtgccaggctagagggccgggcccattccaggcccaccccaccatgggatgggagcagctgacactccctgggagacgggtggcctccgggctccttcatggagccatctgcccatgtcacctgctcaccctgtctttgccaggtggatgggagcccctggagcgggcaggggttttgcaggatctctgtctgttcctactgaggggtgaggctccatcctgtgacagaccacacgaaggggcaggctaagcccacctcaagggaagatgtcactagggcccctgtcttgggactaaggagtctgcagctgcagtggaggtggcagatgttctgggagcaagaatggggcccgtgggcactcaccccgccaaaaccgcgaaagcgctgcaggacctcgcggttaaggaaggaggcgcgggccgggtccgccagggcctcatccaggaggtggtcgatgaagtagatgcccggctccacggtgagcaccatgcctggctgcaggtgccgtgcagtgcgcaggctccgcaggccgggctcgtcgatgcgctccacgccctgtggggaacagaggtgaggggcctgatgagcagctccagggctcaccgtggcctcatcaggagagatgggcatgtgagggccggtgccagtctcgtgggctctcttgaccattggggtcctcagcctagactcgcccctgctgtgctgggccatgggcaccctgataagaccttccaccctgcacatacccctggatcttgagtgtccctggccacactaccctagggcttgcttgagaagccctgtggccacccatgtgcacacacccggggcaagctgcccagacaggcctgtggggctggctgagggttgggctgcccttagccaggccccgctgctggccagaggagtggcagatgccaaaccactgaagccaaaaaagctcttaaggcggctgtgaagccccttggggccacagctttccttccaggcagcccaagtagaaactggccccagaagtcgtggtcccagctcccctaggccgaggcccagattttccgtgtgactgtccagggaggacaggtgccgtcatcagggtgggtctgccagccttagtgcgccagtgcaaatgtgccgtgtgcgcgtggcttggcaggtgtggctcccagaggagagctcggggccttacggcagggccctgggaaatagcccccagccttggagaacgcctgagggacagtggtagagccgctccctgcaggggcccctgtctgcgccccacactgccccagtgcacacccagcctggccttgtccactcacaggcacagctgagggggcctcagcttggctgagggcagcgggtgctctgggaattacaggagagctcctgctcgcctcaggtccccggggcaccatccggccggcggccagggcctctgagccagtgggcacgagtatgctttctggtcaggggatgagcctgccctgcccggctgcactccctccccaggaagcccagctgctggagcgggagctgtcatttctgactgtttgggggccaagaacatcagactccaattagcagttcacgtaaggtaaccagaaacaggctggctcggcctccacgctgggcacggccagagaggctgtgactgattccacggagggcagggacagccacgctgacctggagagagcaggccaggcgggaggcgatgaggagacaccacagcctggctggtgtggccccggccccacaacacttgcctctgggccgctgaccgggagctgaggccggagggcagggatgccccgtggctgaggaaccgtatggagtgacagtccctctgcgcaggtgagaggtgcatgtggaccgagctggggcctgtctcctgcccagaagctgctgggggtcccagggtctctgctccaggaccttcccgtccctgtcatccgaagcctgtgctgggctcccccaccccaccgccgcccatccctctccttcatgctattcctgaagtgtccgtccctgtctccacccacagcaatcgaagccaggggcctgggggaagcaagggcctgccaacgtcaggtttccttccttccagtcacccctccatccccatgggcccaccccggctgctccatggtacacggttgaggggcaggtttgtttccccagagaaacgaactttcctcccctctgaaatcttgaggtccaccactgaagtggggtgggggagattagaagggatccccagcgggcacagggcaaggcctgcctcagcccagtggcgcagctgccccttcagggtgttggctctaggggcctgcccgggggacctgctgagaacagggcgcaggcgccataagagaatgggaagggctgggccgggtggagcgcagagccatgtggggagggcacgagcccctgtggcccaggaagcgcagccttcaggggtggggaggggtcctgccctcaccgcgcccatgctcgcctctgcctgggcacagggcttgacaaggcctcaacttttattgggctccaagcagaggagccccagatgtgtctgcaggcctgaaataaaacaaatgacttttataggaaaagccatattttttccacaatgtttatctgtcagaagaatagactctgagcacaaagaggtgcttactggaaaagatgaaaacagtttgctgccaatttttgctggtggaaaaaaagcgctttggcgactaatgaataacgaacctcagctaacaatgtctggaaggcccagctcttggctccctgcacacaatgggatgaatagacattaggaaattaaaactgattttgtttctccaaatttaactgtttacacttgaggaaaaaaataattgaataataatgcttctcttaagcaattccccccactgcccccaccctgccaaaaaatcattcttagtgctttcaaaacaccctgcagccaagaggctgagccttgtcttggctaactggctggggggccccagggcgtgcacgattgcacaatcagccccctgcattgggcagcccgccaagggcagggatgggagcgccccagccgcccagccgagaggccgtagccacctgcccggttgggcctccccaagcctcacttaccctctgggtggtcctctgagggccggggaaccttgtctggagatggcccccagcctcccttatctgccaacgggccccagaatgcctggggatgaggaggctgcagggtcccaggtgtgcggcccaggggcctgggaggagagggcgaaccagcggcagagcagggctgctccgggtttgtgaggggccagggtgagtcgccagtgggtggggcctcatcaactccccacgccccaggtctgaatgaagccagaggcggcaggacgtgaggggtgccacgtagctccatcacgaagacctgtccttagcaccactgtcctgtggggccccatgcaccgtatcctgactgtgtgccaccttctggacaggtgacacctgggcccagcaggcagacagcaccgcctctatgtccagttctgtggaatgctcacagatgcacccctgtcttggccagggtcccgattcccccctcctcatggcctccgtataccacagggagccatggggcccatccctgccatcccaatacacgcctgctgcctcctagagtcccaccctgccctgggggtcaggctcagcggcagctgatgggcaggccactccgcctgccatgtccacactgacctctgggtagcctcccacgtcgtgcacgtcaatgcccaggaagtggccaagcccgtgaggcataaacacggcccccaggtgagcctggaccatggcgtccacgctgccgctcaggatgcccatgtgggccagctcctccaggtggatgcggtcagccaggcggtgcatgtcaggccaccagacacctgtgggccagagggagctgccgtgagccacagagcccagcagccaacaccgcagggccaggggctgggagatgtgaagccctcacactggctgtggtgggagggcctgaggtggggggtgagggggcaagggtactacatcgggggcccagggggacaaggactagggtggccccccgtgctgggctttcccagcaaaagctctggccctcgggacccttcttgtccctccattctgcctctaggggcaggttcctgtcacctgtagccaagggcccagcctgggtctactctgtagcccatggtgtgtccaccctgaacagcctatgcttctgggcccagggaaacctagccaaatccctgggcaccaggagaaacatgcacgtctccccagtagcagacaccaggagactctgtgggctctggccctgaggctcagacccaaaccctggctcagagctccgatggggttttgctgctgtggtgcagtggggaagcccgaggctgaaaagaggggtccctgcacatcccagaatggggatgaaacacccctggagctgctgcagggagcaaaggtttctggggagaaggtgcggctggcacggccccacgagctggctggcaggggttcggggccccgcctgccaacagcaggggcaccatctccaggggagccagatgtccaactcccggcttcaaatccaactcatctctgccgcatgtttgtggggcaaaggccaccaaagagagaacttcctaagcacagagctttgggggccacacaggctctgtggggctctggagcatggccgctaggaaggaggcccttagagagctctccacgtagagcctcagcagcccacgggtgcgcccgtcccatccccggactctgtggaatcccagcatcagcctctcctcatggtagcttccactgctggacttggcttgagcaccagataaggactcgaggccggtgaggcctcctgccctggccccatgggggctgggtttgggcaggccacgtgctggcagaggccggggccccaggacactctggccaggcacgtggcggggggcccctatcaatgtgcagctcactggctggagagggcgcccagcaagtccctgcggcacctcctggagaggtccagccccaccaggcggagtgaccttggctcccgagggcctccctgccaggcttgccttggcgcagagccagagcctgctctgcatggtcccgatcactgctgtgggaggggccggggagaccctgagctggcgagggctgggctgtgagaagcagggttctgaacctctgtggctggcggagggcagatgatgggctcggctggcgaacagggatgagagtccacactgggacacaggccatcacccccgacacactgggcacaagtccttcatgttgggacccctttaagtgccagagttggccactgtggtgctggggtctcaggcgggctgggggtgcacggctttgggcaggcagtatggctgttgcccgccattcacagcacagcgccccagccacggcagcagcctaagggtggcaggggtggagatgcccagacctgcccccaccccccacacagagcagggatcctcctcagagcccagctccccatcagcccagcctcctaggggctgaggtgggggcggccgtcccggggtctggggtctggcgtgggggaggccgtcccggggtctggggtctggcgtcggggaggccgtcccggggtctggggtctggggtctggcgtgggggagggcccggggtctggggtctggcgtgggggagagcccggggtctggcgtgggggagagcccgggcagacctggggcaactctggctgcagctgccctgtatctggggcagccctgggcacacacacccctggctggcccagcccgcacccctggcttttctgaggggcacaacatcccggaaaaggacacctggataactgcagcccacttggccgctcccccgcctccgtgagcctcagctgccgctggtcaaacagccccacctccgtgagcctcagctgccgctggtcaaacaaacaaacagccacaaggcaggccccggggggttgctctcagagcctctgtgtcacctgggggctggaggcagcaccccggacagtggcattggccaccattcctccatcgcgcatgaccagccagccctggttccacacttgacattcacttgttcctgggggtgtgcgccaagcctgcccagcctctgctgctgctcttctctgagaacccagcccggacaatcctggcccacctcgcccttcctctctgctgctgcatcctccagaggccagaccaccccaaggcacacaggccgttttacctcaggccctttgctatggcctgtgccaggccttgacctgtgatgcctcatccaaggggtctctgcataaaagctgtcccctctcagaggagaccttcctgccttgctgtcccaggcctggtgatttctccttgcacggtccatccagcctgcagccgtcccctggacggatctgctcgtttgcttctcatgtctcactccgagggtgggggtctcccgagggcaccgctgggcctggcataaagtgagtgcccctcaggtctcccaacagcctgcaaagttggcacatggggctgggaggcctcctgtgagtggctcgtgccccaagcccagctcaactgcttcctctcggacgcgcccttctctggtcaccaaaggggagccccgggaagtgcagccagctttccaaccaggctaacttcagcagtgggctacgttcttggcccagcctccgcagagggcgggaatcaggtataaatcatgctctgcggtggcccttcccgggggcaggcccggcgccgcccagatgtgccggcccgggggtccccttggcgccgctggtcttccttgcctgtgcaccctcggggaaggccttgcacacagctctcttggccgggagcagggagtttctgcctgtgtgtggttagggttgtgacagtgattcaacctccagcaacttggccccagcctctggcccggatggtggttacgacacccaccgcctgggcgggggcccctggagtgtgtgagggtcactgtccttgcactaggctggcagggtgggcaccaacttgagggttcccttgctggcctgggcccactctcaggctcctcccaccctggcagcctggagacaccgtcaagctctctagtccaggctggaaggcacccccggcccctagccagcctatacccagatgccacactgagaatcacacagcagaaattgggcaccagctgccctgcgtgccccaacccccagcaagcaccaaacctcattctggctttcccgaagcacccctgcacctgccccacccctcctggagtctgcctggctccctcctccgctgcacaccccttggatgcctgggccatctctttagaacgaacggggcaaacagggccattcccggccccggacgaagcccaggttctcagcttggcctggtctccagcctctccctcacccactcctgggtggggtggctggaccaaggccacgggtcccaagaactggccctccctacctgctgtttccttagctggggccacctcctccaagcccgttttcccagatgtgctcccattcctcctgtgggcctctgtggtgaggctcctcctccaggaagccctctctgattaccccttcctgtactttgagaattcacggaacacacagcacagctgggcctggttatgacctctgggccttgcaagggtggtgcccgtactctgctctgtgcctggcatgctgcggatgcttggtaaacgcctggaaggagaggagccccagcttctctcatggctctcctgcagccagtgttgtgccccatcccccactcctctgtgtactcagaccctagaacgggcagggtggcctctaggttagtgtcccatcatgcgcctcatgaaatggcagggctcagaggaacaagccccgctgctcctgccacccaggccccaggtgtggccagcgtagcccctgagtggtcttctgggtccacttggtctcctcaggcagcacccgctcctgctgggcctagggcccaggccagctccttggagcctcaaagcatccatcacagccccgaggcctcctacccggagtgtgacagccccagggggctcccgggcctgaccgagctacaaaggcagcatcctcagagctgcctccagacaaagagcgcacttcatctgtggaacatggccctcgggatggatgggtgtgagccaggctctaggggtgtaggacagcaggctccggccggggtcccagggcaggccctgagggctggctgagctggcacggggctgaggacctccagctcaccccaccctgcacgggacgtgagtagaagaaccccatctgctgccagaaattctggggacccactcaccctgcgtgagagcagggtgctgtgttggcccaggctgctcctcgagtctcctcccccacaccctggcagagtgccccgaggagtaagaagaggccaaggaactggctcaccattgcggccggcaggaggggtggacatggtgcccacactgaagacagtcctccccgtcctggcacctgccgcagagggtatctatgactggggtggcacatggccgccatgcctatctgcctgagccctgcactccacgccgtctcggaggatgaggactgacaggaagtctagctgctgggcccctgcccctggcgctggctgggaggggagcaaagctggcagaggtgccccctgaccacggggccacaggagacacatgccaggtgggccggggcaggtgctgctgggcccctctcccagccacctggtcatcccgcgcctcagtgcccctctctcgccccgtcaggactgttttggaggtggggacacttcctgccacttctttcccctcctctgacctcacattggcagcacccccgtcactcacaagtggccaggaccctgagggcagggacagagccaggagcgggggaacgaaacacaaaagagctcatgaatcgtgggccaccattgctgttccaggttgataggagctgggcccccagtgacaggggcacaggaggctcctgggtgagcacaggaaagagtagagaaaggcggggaggccagggagggtgggggggtgaggagagagggagctgggtcggggctgggaggcgaggctacaggaggctctggggcttgcaggcggagggcatggggccctcagtgctggggtcctctggagctccagggtggctgcagggactgagcccgcgggacagggacagctgtgctgcttctaggaacagccttcctgctgtggctgtgccaatgcagaccctgactcagggccaccctgccgggctcgcccatccgtcccagcagcgcctccccccattcccctcaccatgcatgcaggggtctgcatggggtgggcagcctgccccaacacaggagccgcgctgagcttggatcccacccaacctcccgtgcatggcactccccgaggtcctgcagctgctgggcctgccctgccacccgcctgtggactcccagccgccagggtagggtctccgtctgagcgagcgcagcctccttcctcgccgactgtgaatgacagtgaggaatgctcccccaccagccctaggatcaggggccaaggcctgcattcctcaaccccccagggtcctgaccattctttcctgcctctcctttgggcttagctatggggtttcctgctttatttactctccctggaaggtcacaggatgcagtcgggcagtctcggtggggtgtttgtcttggcccaggaattgaacccacgaacccagggcatttccgctgggacaaggcagggggctgacctggccacggcctcctcgatgctacgggaggcgacctgccccatccggagggcagctctgtgggcccagggcctgccccacgggccttcactgtgtgtgatccagatggagtccgactctgcccttgggggacaccaatgccacacagctcagtgtgggtggtaggtgtgggggggctgctggggggctgctccattcccttacacagggatcctccagaccccaggctgggtctgggcagcaaagcccagtggtgggtgggagcggggctgggggaggacctgcctcccatggtctgagatgagcctagctggatttggccttgtggccccagacacccctgccaggcctgaggcctgtgcctgccccaagagtcagcatgaaccaggcagcaccacgggatgggagacccagctcaggcctttctcagtgccacatggggcctggggacttgccccgaggtctggccactttctggacagaattggggctgctgagttgggccagggagctggccaggatgccagctgtggagatgccacccaggtcctgcccaggccgcagcaggctttcctgcaggtgaggccagccagggctgggccatccctggtttcagcacaggagactgaggggtaagacaatggctttcccaccgaacaccccccaggccttggcccctatgctgcgtcaatccgccgccctgctccccgtggcctggtgctacctctggcaccctgatgggcccggcactgcctgctgaccaagctgagctcctcagcctgatgcttgggtgtacagggttgctgggcttggtgggcccccgcccctcacaggctgcaaagctctgcttcgccgctgggaggctcagccccttgcagcctggggctctgactttctggacatctggatttcacgactgcccgtggatgtctgacactaccacttgatgtgatggtgacacagttcgcaatgacacagcccaccttggcacagctacagagtgggaggccagccctgtacgtgaagggtgtctgagagactctggcccacctgagaggctgtgcccggcggagggctctccgtggagggtacaggagctgggctcacagatactaggtgaatacaccacaggccacgctcacctgccaaatcctcctgctggatctgaaacactgatcattcattcgagtgactagtggtatttaaaactgagcaagaaattctcatccccagaatgaaggaaggagaaggagtggcgcccctgggcgactgcttcgtggaggctggattggatttgacagctaacgggggatgcttcccatggctgaagagtcagaaagaataagaagggacgcagcaagcaaactgtcccgtcccttcctgcacctcctttatggttttcacaggcgcacgggaattcacgctctcactccctcttccttttacccacaagggcccgctggccataccctctggcgctcttctgtcctcacccacccatctgcctggagacacctgtatattcatactcaggggtggcagctcctttttgtttgttttttgagacagggtctcactccatcacccaggctggagtgcagtggtgtgatcttggctcactgcaacctccgcctcctaggttcaagcgattcgattctcgtgccttggcctcccgagtagctgggattacaggcatgaaccatcacgcccagctaatttgtgtaattttagtagagacagggtttctccatgttgcccatgctggtcttcaactcctgacctcaagtgatccgcccgcctcccaagtgctgggattataagtgtgagccacagagcccggcctgctgctttttaagcaaagcaattccgcagaaaatgctgttttcctcggcagctgctaaaccaggtgagtccgatcagcgctgtcaccccatcacaagcttattgacttttggattttctgtcctgtcttccttttggggcacatctggggtccccctgcttgcactcatgcgtttgtcaagctctgttcctgttggatgcgtgaaggtgtggggctggggcctggcactgcccccagcgtccctccgcggctcctcagcctctggtgggggctctggaggctggactgggcaccatctgcaaaggcctgcccacagtctgcctcctctgaaagcgacggtggctgagggcccctctgaagcacacttgggccggcgatcgaggctgcaactcatcccagcaacgggctgtggggccgcagggactgctcagtcgaccgccgagccatcaagttctgaggccgcattctggaggctccagatctttctttcttcttttttccttgaacactgagggcgcacttggcagctgccagctctctgtgggtccttaacagagggcactccatgtctaactagatgccacggtccagagctggccaggcccgctctgaagtggactctgccttgggagagcaggggtctatccttcgcctgtttggggcttaagtaaggtacctggccagcaggcggcagagctggggctgggctcggggcactctgggtctggggcctgcatcctggactctgaagccttgcgctactgggctatcccctctgcccgcggtaagcccacctggctcctggaggacgcctgagctcccctacacagggggctgccttgggcctgcctgtctctctggaggtctgtatagctgtgggtgagaggcagtgggcgagggtgggggcaagctgggggggctggactatgacctgggcatggccaacacgaggtgatctctgacctcgacccagatggagggactccaggctgcagaaggtggctggggcctgtgtgctgagggcgggccctggccagacgatccagctgtgagtacagggccattgtcctgtgccactgcagccctggccccagcccagacctgattttccacctctgtgaatttgtggcagccccaaatgaccgaattggctggagactgttctgttgcttataaccaaagatgcagaacctgcgtgccttggggggccagctgtgcctgggccggtgtgggcagggaaagcccctctgcgctgcaggctggaccctggcagctgccgaacagatctcagtcagagtcgtgggagccatgtgcctgtagagggccaggcctaggggttggccagcacatggtgatcccataggaacctgcccaggctctggtgaatccaaggattacggcaggggtgctgtgttgaagccctggaaggcttgaagcaagaacatgagaagaccacatccctcaattctctcctctgggcaaaggtgacaagccaggacctcccatcactgctgggaaatggtttctattgttgcagggcagagagctggggttcgatcctgtgggtgctagactccacccctgccagggctatggaggacccaggggtcactcggcaggaggctggctgagcgggatggggacagcgggaggtgcccagggggaactcctgaaagctggccttgttgggaggatgctggctcccctccaggggacctcctctgcctgccctgacagacatcaacggcgcgcggtgggaggtcaagaggtaccagtggggcctgtgcaggctgcctggggttgggagggctgagggcaggacaggttggcctacgctggccgctgggagagagaaacaccaggcccatcctggcctcaacatggccatcatggtggtgactgtgacccctgcagggcactaccacaggccaggcggccttgcaggtgctttacacagcttaactcagtctccatgagtcggctgcttccccatttacagatgtggaaacggccacccagaggagggctttccatccaaggtcacagagcgctgagcggcacgtgaacctgctctgaccccatgccagtgtccagagtgggttgagccctccctggagtagacaccgcttaaggacaaagcaggagacaggctggcgtgctagtggccagtggagatgcgcaggtggaggccagcagaccggggagccttggcctgagccccgcaattcctggttctgtctgtccctgcctggtggtcagccttgtttcctaggagtgaccctggagacctgacgccactggaatctcagggactaagcatctggagtgtggcagattcaagtcacacaatgcagacccgttccctgcaggcacctgccacatagcagcgcccccaacgccacgtcagatgcgcctccccccaccgacccgctgctcacctggcttcatggcacccatgacggcacgggagctccgcagcactgcctcatagacggccttctggtctgcagtgaacttgccgttggcgggaaaggagcaggtgatgtcggaagcgaagcagtaatactcaccgcccatgtcgaacaggctgcggagagaggaaggcagggcaagtgggtactggggtgccaccgcccccttacccttaccgctccccacctgccctggactcgagggcagctggcccgggtcctggatgcaactccccctcacaatgagaccggtgtggggaactgccacctggtgtctcccacgggtgcgtgggcagcaaggaaacccgaagccatcctggaagacctgtgtcttccagggaaaaagggactcagggctcagcccaggcagggaaggctgaggggagtggggctgtcctatgcagatgacacccacccctgtggcctggcctccaagagctcagagccatggagaattgtttggagaactaaggagaggcagagatgccccaggaccccgcccgctgcctggcctccacccggcaccccaacaggctctcccaggtctccctgcacccagcacagagcacaggctgaggccgtgcttgtgggaagcagaggaggagggggctgggcagggaccccggatgggatgcacggcctagaactccgggcctgaatcacaccacctgcttcttccaggacccagagcatctgggcagacactcagtcggcggctagggcctctggctctgctgcagctctggggccccctagctggaggggtgtgcccgacactacccctctgcccatggggatgggacggacatattctgccagggcccaaggggagggcagggaggaagtgccagacagcctcatgtccagcaaggctttcccagggcctgctggccacatgtccccgaagccaggtgggccccctcaccctgtccacctgcaccctggcaccctccggtggcaggcagagaccagcaggacacaggcaggggcgtggagaatggggcagaggtgccagctgtccaggacgggaggggcctgggggccagcagagaggcaggatggcatgggacagatggcgtgggacagacagtgtgggacagatgacaggaggcctgctgaggcaggaggatggtggctggggctgccctctggatgccctgtaagagggacccttggcacagcagggcccggaaggagtagggcctgtccttgctgtgcaaaggacctcagggccctctctgggcaacggcagagaagcagcctcccgctcatcctgtggtgtggaagggacaggatacgggaagggctgctggatccaaacctggctctcaggactccccggaagcagcccaggtggacaaggctgggcctggctgagggggcggaggggcgcaggtggtgcccctttccatccatcccacctaggcacctcgggaggctgcaggcagcagacacagagcggaaccctcgggtccaccagccccttcacaggtcatggccaagtcacgacactgatggtgatgaccctggctggcggaggctggtctagccctaggaccagagcccaccacgtctgcagggtccagaaccagagccaggagggctgaggaagtgcagctgcccctctttggctccaccctgggcttcccatggggtccatctgtagctgggtgagtcctgacaagtctgaggccaggggcacagccgcggcttccgtcacgagggcctctcacccaaatcccagctctcacggtaaacacaaccactccacaaacattccagaagctgcctgtgcgcctgcctgtggggggtcctgtcccatgggagggagccagggggtggaggaccctggcctcatgtggagcaaggagcagggccacgtggctggacaggcagcgtcagccgccccatggaggcagatttctaaaggaaaaacttgaatgcacggccaggacgctttgctgaaatccaaagtccccagccgggcactttttaatctcctgtcttttctgattgcaaaacaccataagcagtgtcaacagggcagaaaggtccagataacacctcaggtgactctcaggctggggggaggagccccgcctgcatgacagggagctttggggtgggtcagagtcacaggatctctggatgcagtgggctgcttaggccaacaactgcctggaagtctactcctgcacagggcctaggcttccccacggctggccgggaaggcggggcacatggaagctctaaactgaagggaaactgaggctcagatcacgggtccaggaaagccctgagtcaggagggtaaacaactcgaagcccagcaatgggttcttaggtcctggcggcagtgctcaaccttcacggcctcagtttttccatctgtaaaatgggaccctcccactgctgtagctctggggagtggagccatatggaacacagcccagttttgcctggggacagctaagcattttcatttaggttccccagagtcaaccaagaaaaatggtttgtggtttgttggttttagaacatgcaagaatagcctgggcagagaggacagggccaggagtatgggggacacggattcctaggaggcgccaaatcagaaggtgacctgcaacagcagccggggcagaaagtcctaccggactgtgctgacacaaaagaaaaagcagaaactgaactatcgtttaaaaaacaacaacaacaacaacaaccaggaagcccacaagaataccccgaacaatgaaatcatctaggaatgtaaaaacaagactgttctccagtgcagaccagactcagatcccagttccccaaactcccgccagcaaagcagaaagaccatgggatggtgggtgcctggatatcatccgccagcctgactttatcttccagcttgtagaagactgtaactgcatttcttgtttgaaaatgatctgctttctggagggggaagtatacacccagccagccagctccatcctgcccagcgaggctcgggtatggagctgaagtctattttcgtgctcctctcagttccctatctttttctgccttaaaaaaatccccctagagtttctacacacataagttattcagatgcaagcttttctggaatccagggacgaaagccatggctttgataaatcatctccctcccgctcctctgcgtccacttcatccatcctctgaatgcaaaccgacaatggagaattcggtcatacgttggctcaatcgagaacaggcacgcaggatccctccttcctggctgtctggggaccctaccatctttggccgagtgagtcgatgataatacaagacatctgggagacaggatgcatctccaaacaacgtgctggcgtctcactccccacatgtgttctgagggctctgtttctggctccttctgggtagctttgggcctgggctacctgccaccactggcccacccagaccctccctgggccccatggcagggacccgccagcccagaggcagaaggcctccaagatgggtcggccagtgacggaaggcttgggaacagttttctgggggaaatgctgcaatgtttatatgagagccactttggacttggtttgcagtttcatttgaatctcctgagtagtggcacggctcttagctgttcaatccaacagtttacacgcgctcatattcggggctgcagaagcactgcagactccgatgtgcagctgccctggtcagtgtcccaggccaggctgggggattgctgagcagcaggaagcacttgcttctcctcagtgtgagaccgaaagggaggcgtatgggtcactcttcccttcatctgccccagtgggcggcccctgcagacacggtggcgagctgtggtctccagggtgcatgggccggctgcctgctcccagccaggccttccgtggagtgccaagctccaagcgtggccagcagggacaaaggccaccactcggagtccctgaggctccccgtgccatggcctaacccaccaaggggacctctctccagtgcgttcctgggcatctctgcccccttttcgtgtgacggccactcctccagggcctcggcagacaggaaagctgcccatgccgccagcccatgacagcagcagcttctggtccccagagccagcaatccctggtgcacgcggtgggtgacgggagcagctgcgtcctgtgggcctcctgggtgtctggagggaactggcattgccattttatgcatgacatggacagaggcacggcaccagtgaggggccccgggtcccagaagagcactgtggggtgcctcgtccagaggtgggtgagacacaaggacagctgccaggaaagcacagtggggtgaggcccgggcgtcagggcagtggccttggcaggcgggagggagagtcacacgcgcagcacatgctgtattttgctttttttggtgaccagtgtctcatgatgtctgggagcacccaggatgtctggacaagtgctgttcaaactgtgggtcatgacatcagctgaggagggtgcagccacgaagcacaaacaagagacaaaccgaaaacgcgtgggcaggtgtctgctcataaccaggcctgtccatgtgtatgaggacgggtgagaatggagagcacgctcctaactgggatgggatgggacggccatgcctgtgggtctggaccctcctgagggcgttctgtggccccaagagcatgtctttaagaccgcagagtgctcagggcagggctggctggtgacaacaagtctccctcggaggaaacagcaaggtggtgggggagagctgggctgggacaggcagcagagagcaggcctgggggcaacgctctaccctggagctcaccaaagcattgggccccaggtggagtggggcaagggggtccccaggagcttgtcacccatggggtccgcagcgcgatggtggcagacagactcaggctgagtagacagcaggagtaggctggccgcatcccaggctgcagggcccatgtgaggccaaggtggctgctgaggtcctgggtgagcgggcaccccatggcctgcagggtcgaggtctcgccattatctagccagggaaggaggggaagagggcactggtggctgctgagtgtgagggctgggacaggtctctcctcctagccaggctggccacccaccccccatgcccaggagcaacacaaaagaccaggcccagcaggggtgaggcctggcccatcgtcctgagacaacactgccctcttctggccagttctggaaggacaggcttgctgcccaccagctgcatcccgactgggacaaccaaggcctggggcatcctgggacacgtgctctagaaactctgcgaggggccacagtagattaaggcccccctccaacccccaccacctgatcgggaagtgagggaggcaggaggagtgtcccagctgctttcccaaccagagccctccacctctgccctgtggggtgagcctctccaggacctggggcggcctcaggcccggagtgctgcaagggatggtccctctctgggcgcactgcttcccagaatcgtggaccatgcgccccctgccctagctgcgaagcttgctggcctgcagtggctctggtgcccacagcccaggctgtttgtggaaggagggggcagcacatgggggctcagaagacgaccaggagaagcagggggatgagtcctggccacctctgtgctcacacaaacctgttcggggctggagtgagtggggaggggtcttctggggcctcccacttaggaatggcctccagtgatctcaggcacctcaatctgtgtgaacatgttgaaagtgttaattagcaagtgtgctgcgcttttgtaaccctgttcttgaaggtctgcctgaggggtttaaaaaggaaaacaaaaaaagcagcgaatggcccctctggtacagtgacttggagatggggttcatggcgaaccccaggatcacagcgggaaaagactctgagaacaacagcaaaacccccggaggcttgacggctacaggccccacatggggccgcttggctctgaaccaggctgagggtgtatgcagccaccacaaagtcccgtccctcacccctgcgtgcatgcgagtgggtgtggtggcatcacacccagagaagcgggaaggggcccgggggtggctggctgggggtgagggacggccctcaggaagtctgtctcagtccttggctgacaagcctgacctgaagcaggaaccagggtgtctggttcataggccctcttggaccatgactgtggccaacagtggactcagcctagctccagggaagctgctggaagggtaaggacggagcagtaggaggggggcctagccagccccaaaccccgcttgatgtacgcatcatggaggacacttttgggtcgaagacacggaacaggacaaccaggggacgggagctgtctgagaataaaccaggcctggcctgagctctgcctgtggctcccacctccagcctgtgctgcagaaccagctgctggaagtgggcatcagggcctggcctgcccagctcggtgaggacaccgggcctgctgctcttgcccgaagagggcccacgctgtgccaggtggccactgcgagagagggaggcaggggcttacactgtgatcattgcaacgcagcacagcctcggtcagttccctgtgtgtgtatccatgtgtgtgcgtgttgggggagtgctcatatctgggactgtggagagagggatggaaaaggctggcctcctcttagtaccccccacccttctgcagtacagctgtataatctggctgccctggaccagctctgattccccacaaaatcccattcctagaagctaaaatatctctggggtgtcttcccccagtcaaaggactaaaacccagagcaggccattgcagcaggcgcactgctctgggaggcgctcggcttcgggggaattctacgctgggctcatgctttagtttcataccttaggatgaagcatcgtggctttcatgttgggataacagactgatttattatttaccgaacgcagtaggcgctcggcagatcaatttcaatacaacaatggactataaatgccaccagcaatctggcagtagcagtaatcaacaaaacatgttgttctaaatgctgcataataaattgactacaataaactcataattactctactggctacatttcaaagttagcactagaaaaatcaaatcaccaatttggacttggcattaacatcctcggatcactcctgcctctacagctgcagctgggagatgcaggtgccatgtgctgtcccggagggccgaggccacagcatctgggattatgccaggaccctctccggggcagataaagagggtcataaaggagcagtcacttcttctggggtgtgctgagcccacagaggagaaaagctcatggccacgtggctctggcacagggctctccagccacccagaagtgccccctggactgtggggacccactgatgtggcctctgccgtgagactgggttcccatgtcctgtcctccaggcccagccagaatgcgctacagggttaaagagctttagaaaaggtttcagggctgggcaccgtggctcacatctgtaatcccagcacttttgggaggccgaggcaagaggatcacttaagtccaggaattccagaccagcctgggcaacatggtgagaccctgtctttttaatattaaaaataaaaaaattagctgggcatggtggcttgtacctgtagtctcagctactcgggaggctgaggtgggaggatctcttaagcctaggagtttgaggctgcagtgagctatgattgtgccactgcactctagcctgggagacagagcaagaccgtctcttaaaaagtttcaggacaccaggtggtgtctggagccactggtgggtccacggtgtgggggcagggctgccaccccctctcctgctctagtcccctgctgagccaagtctgagtttgccaattctttccccaagtgcctctggcctcacacctgggcctggtgccctccttgtgtctgagttccttggcccacacatggggtgaggtgcctacatcgcaggatcagggcgaggagtgggtgagaaaatccacagagacccagaagaagggcccagtcaccttgtggccccaggcatgtaggaggaaagctgagctccgctctgaccctcccagccccgagcacggtggctacgcaggggggactggggactcgcccaccatttgtggggctcactgtggtgccagagtgaaccaggatccgtggagccagtgctgtcgggtaggccagggagtccactaaggcccagcgcgcagtgggtggcggttccactggcctgcctccgcttgcaccctcaacctgccgtgttcctaacacagccctactgtggcggcatatgctggccccacccaaggtctgagctgagctcctgccagcatggcctgagctggaacagctcatcagctatggacctgggtgagcggggagcccgggcagtctcagtaggccatgtgcccaagggcagggaggaccccgagactgagtgtgttcctgcaaatactcggccctgacagctcaacgctcggcagctctctgggcagctggttgtctgtccataggtctgggcatgtgtgttcctgtccttcagtgggcatggctggggactctggggggtgggctcccacgactacctgctgtagggtgaggcggggtccaggccggtgagcagccatcatgggaactcccgctggaggagctggcacattggggtggctcctcgatgggaaggcggaggcagcccagctgggcgccacgcaggcctcagaggacatgccatgctgctggggggcagagggctctgcaggaggcttgttcgggtgcatctgccatagaagaaagggcaccaaagaactgggagggacaaggcacatcctctgctagtcagtgaccacagtgaaatgtctggaggccaagacagggcctgcgtggctgtggctgagccccagggctccagcactggggtagctctcaggagctctgcactgcctgggctggccctggctgacatctgacgtgcagggcacaggcaaagaacgcggagggactgagcagaggccaggctgcaagtactcacacacctcctccctgccccggggcagcggcccagctgctctgccctgcacaccgaggggctgtgggtaggactgcaagtcctccaatgagagaaaagactacccgaggggcggaggccgcagggcctgcccacatctccttgtcgtggcttctatgaagaactgtgagcacggcacatcgtgctcaggaaagccctgcacgcagccacgggtcagcactgctgacttgctgaacgcagggccgcagaggccacgggctcctgcagcaggaggatggcaggtttcagagcgtgggaggctccctgcggtcttcccagctccagaccaagaggcctgccctcctggcaccaagacagaaagatgcgagcgtggtgccccctgaacggagaggacagcctggacagaggctggggatggttcaggccccctcagagagcccacaatcccatggcccacaggaaaccatcgggggcccctctcctgcaccctctctctcagtgctccctggggggtgcaggcttttggccctggagaaggcaccacgcaggccgatagccttggcagagaagtctgggccaagaagcccagggacttgctgtggtcagccctctcaggacagggacccagaggcttctgggccatcttgaagttgagtccaaccttggcctggctgttcacacacagagccagggccgctggccctacttaccacatatccccattctggatcgttcggtcgttgggagctccggcgtgtccgtagtgtagcacggctgagttctcaccactgcaaagagccgggggagggtgatcaaagcccattcttctgcagcaggctctgaaggagggggtggatgctcgatcccctgcccatgagcagcactgtccccacctccagcacaggcccaggcgtggctggaccaggtccacagccagaggtaaggccgggggacatggtggccctgtcaccccgcagtcacatggctggcaaccagcctcagtctgcaggcagagcctcctggctgaaggcgtcgttaggcggctgccctctgggctgggatgtgggcatcatgtggaacacatgtaaaacttagcaatgggccgggtgtggtggctcacgcctgtcatgccagcactttgggaggccaagaaaggcagatcacttgagcccacaagttcgagaccagcctgggcaacatggcgaaaccctacctctacagaaaatgcaaaaaaaattagctgggttaggtggctcacagctgtaatcccagttactcaggaggctgagctaggaggatcacctgagcctgggaagtggagactgcaatgagctatgatcatgccaccgcactccagcctgggcaaaagagggagaccctgtctttaaattaaaaaaagagcaaaaaaggggaacagcagttcctgggcctggagaagggccctacggaacccctcctttcctggtggccaaaggggagagggcctctatggaaagggccccggctgtcctggagctgccctggcgtcctgaccaggctggagagagaggaaaccaagaggatcctcgctcctctgcctgagaaggcttccctaatgagcgatgcctttaagaaaaaaaggacttttaagtctgtccaaaggggggaaggaaacccccacctgggtgtaatatttatggccctgctcaggagtcttgggaatcataaaagtagaaataatggttttctctccatccaccagagaagaacatttccaaggactgagatttcacatgtattattcatgtgccggggacgtgcgcattggcagagctgcctggctccatcctggccgggcaggggccagacccgaggggcagagagcagggagactggctgggagagcgcaggagacgagggggccacgcccacagccaggacgcatgtgggggcagacacaccccaagggacacatgccgctgtgcatggcccacacagcatggcaatgatcccatatcactgtcatttctaccatgtgtgtgcctccaagcacacccagccaggtgttgatggcacacacccaagcgcacacacccacacagagccctgcccctcggcaccatgtgccacgagcaggcacaccaacagtgacatgcacacccacatacagcagcactggtccccacgcagccacacccacatagacacaccaccaccactttctgcactgacccttccacactccacccctgctgcacacagaagctgcccagcctgagctcacagcccggtccccacatgctgtgtgtgtgcccgtgtggaggagtggccttcctgtgcttagctgctgtgctgaccagctggggacaggagggaggggacgccaagcagcccctctgcagtgggcaggccatgctccctccttcacccagtgccaggtcctgcaggcagaggccacctcagctccgggagtcttgggagggaggagcgacttccaagcttgggccgggcgctggtgtgggcgtgtgagtgagcaagtgtggctgagctgggggatggtggagccccccactcactaactgccctacctcctcccactggtcacccccaggggagccagggtgccccgcttacctgccgcagatgcaggtgtaggagctgtggcgcatgccgccccgggagtagcagtagtgctcgaagaggctgcagggggagagacgcgtcagggttggggcactagagcaggcacaccccactccacgagccccatgaaccccaagggaaggccctcggcccatggtctcccctgccgtggccccacaatggtccaaactctcagtgtgagtctgtgaggcttacagcctgggggtcagtcataggctgcagaatctcagaggccagtgtggagtgacagagaagctgggggcccagcagggcgcagccacctgccagaggagctcgccagcctccactgactgccatggcgagtggcttcccaggcacatcaggacagatgggactcctggagcctgcgccctgtgggaagccgggctggggcagaggccacacatttctgcagagctggaggaagtgattccctgtgactccgtgcccagaggccaccacccaccctgccaggaggggctggatctacggcctgcgctcacccggggagagggcacaggagctatgggcagaaggggcaagggacaggcctcctgcaggtggggcagggcagggtggtctccagggatgtgggagaggcaaggcctggggcacacatcctgcttctccctccttggaacgagctgcctgctggctgggcccactctacaagctcccaccctgagcgggtagggccacagccaagtctggagagaaagacaagccctggccccaggctaagcccagaacctgcaccggggaggcctctaggatggcggatggtagcacagtcactgcatggatctttgagctccaagggactgagccattctgccttggtcttcctctactgaacccagctggtgaggggtgtggtcgtggggagctgccctcaccccctccctgaggcctcggcaacagctttcctgccggaccacagctggtccacctgccaccacgtgagacaggcccaggtggcccccacccgcccacccccgaccagggcagtcgttgcggccgcccaagggcacgccacatggcggtcctgccctgcacgttccaggcctgccttagagaacgtccatacgagggagtttcatcttctaggcactgtcaacacaaattatgtataattgtcatgattggatattaagcagttgttatgcaggaacggctgtggtagattcaatgggctttcagacttgccttccaaacctcacaggataattgggtatctgcgagtgaaatatttcctgaaaagaaaggatttcaggagctgccagggaagcaagaaagccacatgctcctctcctcagccgcccccgtattcgtggtgcaagcgctcaggaggccgcttccacctcgctcctgggagtctcagcgctgagtttcgccacagtccaggcacgttcctaccaaggcaggcaagggcagtgccccacatggcaagccctgtgcgccaggccagacaggcagcctcagaagccacttcacacctctgtggcgccctcccagaaagcccgagaagaggcctgacccacgccgtggaacaggggtgctcccttggctttgtgagatgtggtcctgcaccaacagaagcgaacctcagaggtcacatggtcattctcgacgtgatggcgacagcggacctctgtgggacaagtgacctgcagacaaccacgggctgcgctgggactggccggcttcagaaaagacaggcagagggacagagatgccatccgcatgtgcagaggaactcacatattctacaagaaaggagcggcaggccgggcgcagtggctcacacttgtcatcccagcactttgggaggccaaggttggaggactgcttgaggccgggagttcaagaccagcctgggcaacacagcaagaccccagctctcaaaaaatcaatcaatcaatcaatacaagaaaaaaacatcagaaaggggaggcagtgaggaaacttggctctctcgcctgcagcaagcttccccctgcataacccactcagtggagacaactgtctttgaatgcctttgctgctttttaagaaaaaaatagtgccttcaagaaggcacagctcacagaagcatcaaactaaagaaaggctgacccagttttcacctgcaaagtgcagcccgacactggtcacctttgccggccacgttgacaactccacacactgttccataggaaggagttgaaaagaggaggagcaccacgtgctggatattcacgcccgcctaaaaaaagctgaaatgcttcacagtggacttcagtcctgaattttgttttaaatgaccttttctgacgcaacttgaggacacactggtgctttggtggcaataacaggtgggcaaaacgagcccacgttttctgcagactttaggcttggggtgtggacgcacaagggcacccaagttctgggcagctgtggcggcacagggggcctgtggaagcgtgtgagcccggcgcggcacagttctgatcttcaagcggtgagcactgaggggtggacattccaaactggggcccatgcttgatgcggacgcaacgtgtgcccccgcacagctgggccagagcttggcgagtggtgctgggatgaccaggagcaagtgtgggctatgaggacaggctaacagcctgtcccgtggatgaccgacatgccatggcagtggcagcatcacaactcctccaagtgcgaggcaggaggggtccagccaagtcatccctggagcaggctagctactacccacccaaaataattaacacctggaacaggctctccagcagagggcagcagccagcaagacaggcaggagtgtcaccgccccactgcgaccatctccataggctccttccataaatttatgactcacatcgtgcagccccggaccagctgggtctaacagcccctgctccctcctgctcacctggaaggcggatggggtggtacacacaccccagccaggctcaagcccagcgcgcacctcctccccagcagcagggaggggcttcctgattggctgagaggaggccgtggtctgcctaagtcccagccaacgacatcccggctgctgtgtgggccccgttgtttttccttatgtggccattcctctaacaccctcacctataaatttctcccaggcaagactcgggtagaagaggcttgtatccaggcataagtgagagagcccttaagcaacctgggggaactgcatgagtggtgaataacgaggtggatggagttactgcagtgtcagtggggcaggcacatctgtcagtgccaggagatgacaaatggggcaggagcagcaagttcccagacccagatctgcaggaatggggtccccagagacggcgtcgctgggcctcccactgggacccacaaatccagcccgtggagcgctcccgggcacacggcccagctcctgccctcagaagtttatcacctaacatgaagacgagtcacagtcctataaaaatgctgcagctgcccagacagcggtagaagggctgcctggcagcaagtgtcggccaagctatgtgcctcgagcatgggtggggtagcgccgaagaggttagtgaggcagtgtaaggggtggccctggccacatcattccctttccccggctgggcctcaatggatctcaggtactcaagaggtggagaggggaggctgggccggaaacagaagcttgggagtgaaaatgcgcagagctggtggagccccctcagctgggcagagggcttaggaaagcaggtagttgggacatggggttacaaacctgaggtggggagggtgtgttccgcaccccggtccctgtgctgggctccctgctctgggccccacatacccagccttctgggactcaacaccaacctcaagggcaaatcttggctctgctgctggccagctgaatggcctctccgtgcctcagtttcctcatctgtaaaatggggatgatagcggtgcctccctcccagggctgctatgccagtcgaatgatttaacatacatggagtatacacaatggtgcctggtacccaaggagctctgtgtacagtgacctagccatcgtggtcactgttcagaggcctggagggaggctggagaatggggatccctcctcaggcagcaggagaggaggtcgtgggcatcctgtgccaggctttgagaaacagcctcttgactattcctttaaaaccaaacagaatctgcataggtccacggcccggacacccactcccgcaccctccaggcagccaagttctctacagaagtccttcctgggcccacacactcccagcatctccaggatgttcaccagcaaaaacgcggaggtgtgtcctctgcaccagctaccgggacacgtgcgcacagacaggcttctggctggacagagggggcctgtgcccaccatcccttcacagctgcccctcgccctcacggagctgacccagggtccccgccttcccggggtgcgcccaggactggggcacataagagggagagagccacagagagtgagaagtacctcatgatgtttggggccaagcagttgtgctgtgtatagtcgtctcagcactaagttgcttataattcacatttattttaagtaattgctgcgatattttctgggtacacatgaccataattgtgtcattaacgtgatacaccacttactaagggaaaatccttttcagagtaagggccatacagtcctgcaggggatgccctgagacacctcaggccgagcagagcgtgccttatggtccccaaagtgggagcagctactatggaggacttggagccaaaaccggatgtttctaccagtggagccctggcatagctccttttgcatggaaccagaagcacgtactacattcttcttgaattcccatggaaggaggggagctgctccacgcccttcttctggggtgaccagtgggtcatcagaaggcacaggcgaaggcgcccaagccctacccttggaatcgccgcctgggtggcaccagcgacctatccaggaccccaactcccaggcaggtcctggctcttttagcactgttccccgtaggtcttccaaagagcaggtactgggacttggcagtgaactgggggactgctgcgtgcctccccttccccaggccccagcatgacgacaaacacagacaaagctaggaatgagcaccctctgaggctccgagtgcctgaaatgagcaagaggcattcacgtgatgtgtcaccaagaagggactgacctgaagcctcggactaaagccagaaatgcatgattaataaaactggtgctagcggagagctggtcagcatcaccgtgtagccggcaccaacatggcagcgtcagacacaggccgtctgcagcagatgcggtgctcggcttcagcagcttgctctgctgcccggagctcctcactccctcttcctgccgctcctacaccagtcctggcccacagacagagactgtttgacctggggcaacaccttcccaccagggcttccagaaggccagccagcatggtcacagggtatatggggccaggcttcttgggcttgcatggaccatctccatgtgggcaagcagatgaagtcacactcctggagccccactgctgcccagatcactctccctgactactcagctcctgccagggagccccacaaggcactgcactgtggggatgggtgggcagactgattcaatccaggccctgctgcccactcagtctgaggcttgaggcaggttgtgtagctgctccagtaagaaaaactgaacagtcaactgcagcatttagcatgataacaaccctttgggggctgagggatcttcccactgcacagaggatgctgcagtcagaacaatgacgggctggggtcaggaaacccactgaatccgtgttcgggctcggagtccacgcagggtctccgactgcaaagcttatggttttgacccggatgcctctgaaacctcaggtctgtcagtaggtgggggctggaacagtgctgacctcggggcttgctgtgaaggctgaagaagatgcagggaaaagcttcaactccataaacactggcagtgggtgatgccatggctaacgccttccggagccctgaccttgcacccatgcacaaggccagaactgagcagaaaagggtctgcaaggacaactggcccaccaagtcctgggcgaaggagccccaggccagccggtggaaagcaggagctggggtctgagagaggcctgggatgctgaggccccgcccagaaggggggatccgccaatcacaggcaagggcagcggccaagacagcagcggtcacagcaggaggaagagacacaacagacaggagcagctcactctctctctgagagctgccttatcaaggcacaagataattagcattttaattggataattgggaattctaaattgcctatcttgtattaagcataactgaggacataacatgacattcaattaacaaatcttcccctttattttcaacgtgcttgattaggttgagtttcggagttcctcggatcagttacggataaaacattctatctccttctccgtccccaagcctggctcatcagactgtaatatacttatgttttatatgtacatggagaagtcttagaaattctctgcacaaagaaaaaaagtcactgatcgtgttaacacccagaggtcttctctatccaatattttgttgaacattcttccaggcattttttttaaaggtataaacacagattaatatttaataattattttaaaaataattagctgtggccgggcgtggtggctgacgcctgtaatcccaacactttgggaggccaaggtgcgtgaatcacctgaggtcaggagttcgagaccagcctggccaacatggtaaaacccgtctctactaaaaacacaaaaattagccaggcatggtggcaggtgcctgtaatcccagctacttgggaggctgagacaggagaattgcttgaacctgggaggcggaggttgtagtgagccgagatcgcaccagtgcactccagcctgggcgacaaagccagactctgtctcaaaataaataaataaataaataaataaaaatgattagctgtaattaaaaaaaaaactcacctttttacagaagtgggacatacatacagaaaagaactcaaatcctacagacacagcacaatggcccagcacaacttgggcacgcctgtgtgcctggcccccctcctggtcagtctctcttccccaggggcagcctgactcctatcaccatagattagtttgcctattttttaacttcatgtaaatggaatcaaacaatatggtctcttgcgttggctgcttccgctgccacaatgtttgtggacccgtctaggtgggcagcagtccctggttggttctcactgctggccggtgttctactgcgggggtgggcccccgtgtgtttctccattcttctgtgggtgagcgttcgggttgtttccagatcacagctattatgggtagtacagccatgagttcttgtacagtcttttggggcccatgcatgcatctctggttgagcaaacagccaggagtggaaatgctgtgtcacagggtttttggggggtcagctttagtagacaaagcccaacaggttttctgagtagtcacatctttgtggtcactgtcctgaaacttcctcctctccatacctgtgaatggggcccaaactgggctgaaacaagtctgcaaggacaaacagcctagcccggtccagcgcaggggctgggctgacccactgaaggttcttgttaaagcaaagaacattttccttatcaacagatacatgtatgtactttttatttttgtttttcatttttatttttagagaaagggtttcactctgttgctcaggctggagtgaagtggtgcaatcacagctcactgcaggctcaaagtcctgggctcaagtgattctcccccttcagtttcctgagtagctgggactacagacatgcaccaccatgcccagctaattttttttatatgttttgtggagatgggagtctcgctacgttgcccaggctggtttggaactcctgggctcaagcgatcctcccacctcggcctcccaaaggtccggtattacaggtgtgagccactgtgcctggcctatttttatatttaatgctgtcactatgtccagaatctgaccacttctccgcaccaccacaactccctccctggtgcaggccaaggttctctctcccctgggagatggcgatggtggctggggatggtgaatggtgatggtggtctggctggcccccctgcttcagcccttgtcccctacagagtgtgctccacaaacggatccttccacaacttaagtagaatcacaggactcctctgctcacaccaaccccggcttcccatcggcagcccacctcccccttactcccctgtcttgtcttgtcttcttagtcgaactccgcgctgctcctggaactgccaggcaagttcccaccaggccactggaacagctttttctctctgcctggaatgtccaccccagaaagccacagcatgctctctctcccccttcaggtctctcctccccttcacagggaggcatcctgagtccctggataaaggtagctccctcccctgtaaccctcaccaccatctgacatgtttatctagctatcccatcaatcaatcaatcaatcatctgcctatatctacctacttatcatccatctacccatccatccatctatccatcactctagatctacctacctatcatctacctacctataatctatctacccatccatctatcactctatcatctacctatcatccatctacccatccacctatccatctatcatctatttacttacctatcatccatctacccatccatccatccatcactctatatctacctatctacctaagtgcaatccaactacccatccatccatccatccctctatcatctatctacctacctcctacgtacctatcatccatctacccatccatccacccatccatccattccatctaccatccatctacccatctatccatccatccctctatcaatcatctatttctgtcaacctacctacttatcattgatccatccctccctccctctatctatccatccatccatccttctatatctatctatctatctatccatctatccatccatccatctctctatatctatccacccatccatctattcctctatcaatcatctatttctgtatctacctacgtatcatctatccatttatcactctatctactcatccaatactctgtcaattatctgtttctatgtctacctacctacctatcgtctatccatccagccatcatcctatctatccatccatcatctatcaaggtgatgatcatctatatcagcctacatacttacctacttatcatccatccatccatccatccatccatccatctatccaaccatctctagcctcccattaggcttgagctttatctttttgttcactgtagtatccctcaagagaccagaacagtgcttggcacatcagaagtctttggtatacctctgttgagtgactgaataagtgaatggctgtatgagcagcaccacagcctctaatttacttaaccaacttcctgctgttagagatggaggcttcttctgcctctctgtatgatggccacgcatggccttgtgcctcttcactgtcctcgggctaaattcctagaagggagattattgaccaaatgcacatttccaattctcagggcatgttctgcaaaaaggacccctgaacactcataaggattttggggtcctgagcagcacactgcaaggctcgtctgcccacaggaatgggaacctggtgggtaaaacacaaaagtatttcactgtttcactgatgaactgacaaattttaatatgcttatatgtctacttcctcacatttcttcctttctgaatggcttgttccttttttaaaaactgcgaatgttcatcattttcttattgatccttaagggatttatacaggaagaacacaggcagtggatctgactatcatttatgtaacaagtttcccctttgctccttaattttctttatggcatttctggacagataatttacatttttattggctagatctgttacatttttttctttatggcttcttcctttaagaagtcgttccctacccctatgattatataaactctatcatcttttgtgggcttcctgtttgcacatttacttaatcaatgaacctagaatttattgtgatgtaggtcatgaggcagaatgccatttgattattttctttgctttcactaactgccccttgtgcgctggcttggagcaccatcttgttgaaagataaatcctttacataataagggtggttgggggctgcgcctgtcacctgctcctgtgctgggacttcccactgccctcactggggctttcagggcaagtccaccccctccccaagcagctggccctgtagtgaccccctccagtaagtaccttctctactgattcccaggaagaaggacaggacaccagaggcagaacttgactggtgcctgggaggctgacaacacagaaccgaaagaaattcaaagctcgcagtacccgccttgagggaaattcgcaatctgtgactctagacctgtgtttggcaccttgagccagcgagggagctccggctttggaaggcctgggaagagctgtgtaaacacaagcaccattggccaactgttctctgacttattctgggatccacacctgttcgcgtctgacccaatctcactaatccatgctgactgtagagatgacacctttcttggccctagaacaaaaactcccccttttaaaaaggaccagaaggccagtgtggtggtgcatgtgtgatggtgtactcaggaggatgaggcgggaggatcgctggagtccaggagtttaagcccagcctggacaatctagtgagacccggtattcgtccattttcaagctgctgatgaagacatacccgagactgagtaattataaaggaaaagaggtttaatggactcacagttccatgtggcttgggaggcctcacaatcatggtggaagacaagaaggagcaagtcacatcttacatggtggcagggaagagagaaaatgcgaaccagtggaaggggtttccccttataaaaccatcagatctcataagacttatttactaccatgagaacagtatgggggaaagcacccccatgattcaatatccacacagccaaaccatatcagaccccagctctttaaaaaaacaaaaaaacaaacaacaacaacaataaaaaccaggttaccctcagatacatccagagaggctcaaaccacatgaccaggaaacaaaaagaattgccagaggccaggtgcagtggctcacacctgtaatcccagcactttgggaggccgaggcgggtggatcacttgaggtcaggagttcaaggccagcatgaccaacatagtgaaaccctgtctctactcaaaatataaaaattagccagtcgtggtggcacacatctgtaatgcgccactgcactccagcctgggcgacagagtgagattcagtctcaaaacaaacaaacaaacaaacaaacaaaaaggcttgccagagtggcagatgatcctagttcaacacaacccagaggccacattgtccctctaaggaacgctggcaccctgtctccatcctccccaggaaggtgtgggggaagcaagccaggtatgcagggagctttctggaggggcgagcaggggcaaggggagggaaggggctgcttttaagttcacatttcccaaagcacaatacgagtccacgggatgacattatgtagtaccccactagcatatttccttcatgcactaggtatttatcttgaagcgctaatgtctgttaatggcaaattagattgggtttcattcatgacgaggataaaaagcatcttaaaacatatatttaaaggaaaaaaaatgagtcaattgaaagaaaacgattaagcagataatagtagaggtgagacaagaacttgaccaaaactgccagggtgtctcatggaatgactaactctgggagatcccgccttaaggcttctttgaggaaaagcctggtttttcgttcttgggcaaggcctttggttcagaagctccccaagtccccagatggcagcctcaaactcctgggctcaagcaatcctcctgcctcagcctcctgagtagctaggactactggtgtgcacaaccacacctggctaatttattttattttattttatatttgtagagacagcatcttgctatgttgcccaggctgctctcgaactcctggcctcaagtgatcctcccacctcggcctcccaaaatgctgggattacaggtgtgagccactgtgccaggcccaggttcaatatttagggaacacatgtttggcagaggatctcaggtctcatgtcactgcactccagcctgggcaacagtgggagtcacccagatcccaccttgtagagtgaggacagaatccccaagtcaccccttctagaaaaagcaagtgctttgctttggattccctctagggcatttttctgttttgtcttgaaagagtccagcactactttatttctaaacatcaaattgctttttcagccttacaatctgaaaatacttcacaaatgtgtcgtttcagatctaactttctctggaaagtgctgtttcctatcaatgtctttctaaagcactgtcgcacctgggcccagctctgggcagcccctgcaactcactcagttcatcctgagggtctagtacccagttccctccctatcgtcctctgctgagggctctggagaagagaggagaagcagtctgtccacatggactcacagccactctcggtactgtgagcacaggacactggatacagggacctggtcacccgggaggcagcgccaagccagtggtcactgcgcagcaggtggccttggctaccccattaggctggagggaaccaggaggagctgggtcactgaggaaacaggaggagctgggtcactgcagccccagatccccagcacctgcaggaagcgaggaccacagatgcctgtgaaagacgtctcctctctgagaaggttcttccaagcatccaggaaccacaaggcccaggacgcagcgaaatgtgccatggagggaggcccagacaccatctgtcagggccagcctggacaggccctaggtgggcagggcccctccaccgcgtgcggctgtgttttatggcagcgaaccggctgttaggcgtgaactgccgacaacccctcttctaatgagcctttccatcctcactcacgactccaaacgttattttagtcacacttggctgaaggaacaacaggaacgctatttatcactttgaaagtctttatctacttaagatgatgaatgggggtggcagtcacgccgcccctacagagagcagccttgagaagaggagtgccttggccagggatgcactccaagcatggagctggggaggcggaggctgtcgtggctcatggcatctctagcatgttctgcacctgtgccccatcggggacctctcagtgcggatgccaccatccaggtcctcagcaccctctcgtgccacagagcacagaggtaggagatgggggaagtgggacagccccaggagccccccatcggtccccacctgcagcaggatgtccactttggctccacagaggatgggaggggcgatttaagaaccaactcacatgtcctaaacctttgctgctgacatcccagagacacagggcaagttccaaaaaatcctccaatcggaggatgccaggaataactcttgcaaattcaactttggggtagcttaaacctatttatcaatagctaattaataaagtctaagtctttggatgacaggatgattaaactggtttttaaataatccatttttaattaaaatgctaccctcttttggcttctggatatattcaaaaggaagccttaacagatcttgtttttaaatatacattatacgaagccaataattagaagaatttgtgcttttaattatatcttaattattctttgcctatcgatgcaaagttaaatatcctttctttatgacaccaacactactccccaaagccagtagattgctagcaggaattgtgtgtgtgaagcctgctcccggagatccgtgcagcagtgacggtgcctgtaggcaacccatacccccgtcctggcaggcggcaatctgatcatggcaaagcactggctctgggcagcactctcctggcccccaccttgtaagagacacgcttgaagacagaagtggtcgttatgtgatgagggtctgggcccccctcctgcatagccaggagccaggaagttccttgactttactcgccagcctgcacacactctgaagcatctcgccagcgccacccactgaaatttagaaaattcgcacagtgccaaggagggcttggaggatgcagaagagggagtcacgcccgtggatgccgggtttcctgatgtgctttgctgggtccccgcagggagcccaggcatcacacacctgtccagcataccccgagctccctcttccaggacccacagcaacacctatcccaagcccacccacttctagcaccttctatcggacaccttccacactgaccctcaaccacctgccagtctttaacaggtcccctcctggcccaccttcccaccaggaggtcatggctagaggggtctcagtggactcctggcagctgctgcccttcaggagctgggaggatgtccacgctccacctcctgctcaccgccagttaccatccaaaaccaccgtgggccaggctgacgcccctctccagaaatctccctgggttccccaaggggcttctcccacctctcaccaccaaaagccctctgtaggcaagtccctccccacacttctacactgcagaactttcagcctggcaccctcccgttccctcccagtcttgaagggcactcctagaggcaggcccatgtcacccatacccaaggctggccacagtgatgagcacacagtaggtcctcagtaaacatgtgaagaaagggtaacggatggcaggaacagcaggcctgaacatgcccaacaatccaaagaacattcacacatacatgcacatatgcatatacgcacacatccacaggcagccgaaaccctgtctgcccaggcagccccgagtggagatctagccctgtgttcactctgcttcctctttctgggcacatatcttagcctccctgcagctaggctgggaccataggactgactctcatcccaagaggaatatgaaatgacatgtgctgcttccaggccatggcttttaagagtgggtgtgaattcttcatgttctctctcttccttctcagagggggcagagttgggcagtggaagcagccctgcatccctgctggaggagagccactgggccagccacagatggcagcatgagcaagaaatgagcctttaccgtgctaagccaccgagatctgggtttctgttgttaccaccccaaaggctaccctatactgactaatacacctgggaatttagaatacagcaaaaatggaattttacaatggggggcaaagacattactccaaagacaacaggtcacttagtaattacgcgggggcagaaaagccagaatccttgtttatatattattcttaaatgcagtttagctcaattaacgtattaaatataaaagacgaaaccatgtggatacacagatatctattaaactatacacagcagtgtttgaaatatttcataattatgcaaaaactgttatttaaaagaaagtcatcagactataaagatagaaaaaacatgctgataactggattatattgaggtagtagaaaaagcaatttcgcaaaggcataaactatacaggaaaggaccaacatgacaactgatatttacaatttctgtacatcaaattgggaaaaatatttccaacacacagaacaatagtacaaagagcccaattacagagcaataagtcacccacaaatgtcccgattgcaaatgggcaaaggactgaaaacccacaaagataaatgcccaagaaatacttacaagagaagtttaagctcgtcagtaatcaaatcagcaaaaataaagacggggtattacttttccctaatcagaatgataaaggtgaataatggaaataacacaattaatcttgaggcctgggtgggcacaccggcactcatggtttgggaggaggggtgtcctgcacgctggctgagaacatggcttctggagagaggccacctggctcctctaagacccatctgtctactgtggggtctctataatgcagagaggatgccacactcctctccgctccccctcacgggattaaatgagaacatccccgggaaggacatggtatctgctcaccagacactaacccagccccagccgtgaagggagaacaacttttctagatggcactgggctttgggcatcaacatttttccagcaattccatttgcaggagtttaccccaaggacacggtcagtttgacacccgagagacggcgaggtagggttgacggtcgaagtgtcgttcacactgggaaccacctggcttccgggggcagtctgggtaagtggattatgatgcagccccagtgtgccccagttcactgccaggaagagacttctgctgcaaaaactctgcccagtgtgagcccagcagatcaaagcccgtctgtctgtgccccagagagaccggaagcctgtttgctacagcaataaggttttgtgtgcctctgcatcaaagggtttttttcctatcttgtttataatgttctgtactgactggatttcctactggcatatgtatctttttatcagagtaaagctattttcattttgaaaacacttttgggaagaaataaaagctacctgtcaaagacctgctcccctcgccccagcctcgccccactggccccagggggcttcttgtcctgatgtgttctgcccagtggacacagcgcacactccccaagcacagctgccaccgaggacgacactgggaagctgccaccagaggtcgcaagtgcacgccgtctgccacgcacacagagctccttgaaaaaccttcagcctggctgaaggaaccacagtgtatctctgttttgataccattgttgtggacaaagtaaaaaataagcaatccagccaggtgctgtggctcagcactttgggaggctgaggcaggaggactgcttgagcccaggaggtcgaggcagtgagctatgatcgcaccactgcaccccagcctgggcaacagagcaagatcctatgaaggaagggaggaagggagagaggaacagagaaagggagagaggaaggaaggaaagaaggaaggaaggaaggaagggagggagggagggagggagagagggagggagggaaggagggcaattcaagcccaattccttcccgaaggaaggaagagagggacgaaaagaaagaaaagcaattcaagcccaattcctccctgactctatcaggaaactctaccatgggttgaaatcacccaaaatctgaatgtccaggtccccgccggaggccagggctgggggcccatcttcatcatcccaaaactcatgtgggaaatttccccaagaggagacagaaaacaaagcaaagatttcctctcttcattccgcccaagacaaagcatctgaaattccactctcgatgtttccttcattatctcccactttctacctctcctttttgccacagggggaaaaattcttcctgggaaggacatcctcggagacactcccctcccaattaacacccatctggcagcacctctgcctgaagatgggtagcaaatgctagtggagggaccactctttcctgcttcctggcctcatgatcaaaatgggaagattaggcaggtcgtggtggctcaagcctgtaatcccagcactttaggaggctgaggcaggtggatcacctgaggtcaggagttcaagaccagcctggccagtatggcaaaaccctgtctctactaaaaatacaaaaattaggcaggtgtggtggcaaatgcctgtaattccagcttctcgggaggctgaggcaggagaatcgcttgaacctgggaggcggaggctgcagtgagctgagatggcgacactgcactccagcctgggtaacagagcaagacaccacctcaaaaaaaaaaaaaaaaaagggaagattaaacccagagtgaccattacgagtctaagagtcataggctgaagctaagaagtcttcccaggtaagggccactctgggaagaaagtgcagccctatcccttcctccacccagagctcctgagctgctccactgcaccggcaggtttggaagcaagctctgtcggcaaggctctctggtatgcagcctggagaatccaagcccctagaaggcctgccaagtcctgcttcaggagcccacttagccttcttctctggaatcagattctttggcaaaacctctgtctgcacacggaggtatcccttttgcacagggagctagagaagtcagagactggttggaaaacagccttgcttgtctcctctggctaaacactccccacacggggcaccccaccctggggaccacccacccaagcaaaaggagcccaccccaccccaggggaacaccgacagctcaggtttccactgcagacaggatggggcagaacccgcagctctgaagagccgattgaaaaagcaaatttccctctggtgctctcactggaaaaaaacatgatagctctctcccctgggagcaggaggaagcctctttgtccaggaggactgtgctgttccttggaaacgagcctgctgccatgaacagatccagcaggtatgggcaaatcacctagaatgcataaaacattacgttcgccaaatccccctggacagaaatctcggattcagcaaacagctcagatctgaatggatttccactcacagctttgaaatcccccaattaaaggcacaagcgcatggcaaagttggaagctttggcgcttccgggctcccagtacccacagcctggatggagatggtggcagtgacatggcctgggtcacatgcacacgccttccagaggcacctcggcctcctcggctatagcagctagcgggtgtggctggcctggagcgacaggctccctcactgccatgctgcctgcagctgggttcccttgagtgaaaacactttaagggaattgtttctatccctccattcctgaacaagccagtggtccccagggccccaggagctacacacccatttgcatgttgtccctaatcaactgcaatccatgtcaatcagggccttactggtctcgggcacagaacatgctgggtgatgcctcaaagtgccagcctccccagcaacttcactaaggaagaggtttctttataaaatgtctgcagtctgatggctggctctcctctctttcagtgtgagctgctgttttctccttaaactgcagagccagagctctcttctccctgccaagggggcacgcccactccacaaacacacaaggtacaccaaagcccttgagacactcttggaataatgatgcccactctgtacctccaggggacttaactaatttataaggcaattttaataataaccatatattaattttacatccccttttttacctatttcagtggctatgaactgttaggaattaggtaatatattacaatgggctcctggggtctttttattaactaatgccccatatttaaaaaccttcttgtcaaatgagaaacattaagaagcgctgtcccttttataattgcttctaatagactcgatattcaggtcctggcctgaacagagagcccaggcgatacttccttaaattgcatttaacttttcattttctttctgtcatcggccaaccgaataattctgcaagtgcacaaatggtcattttaccgtgtcggtctgtagctctggagatgtctgtaaatctgcaagttaggaggaccactcaggtcaagagatgcacagcgtttctgcccggagtctggccgcaggagcaatgcttggccattttggtgtgtgtgtgcaagcctatttatcaaaatatatgccagtaaaccacacccatcttaaatacccagattgatgacatctcacaaacgtgccccgtgggtgaagaccccaggacatttcttgtctcctagagggttcgctcaccaccccttctcttcccctctcctcctctgtcaccagttttgcttgctgggaactttatgtcagtgggatggtacgtgcctttctgagcctggcttcttttgctagacatcactttcagcgctgttcgtgtccctgactgtggcaacaatctgctcgttttcactgcccgacagttctccctgtatggacacccacagtttacccacccgccatacacaggcttggcatctccccagctctagactcctcccccacctcatgtgtctccggtgcacatggggcaggcaaagggggagtgtggggcgccaggcatggaatgcttggttttgtgtggacgctgccagctgtgtaacggcgatggttctagcatctctgttttctgcttttttatcccccctggcagagaagaaactttgaagctcatcactttgtgggcctaggctggaggcatcggggcacctcagtaggcccaggggctactgggcattcctccactgcaccatccctggcagggcaggcgggaatggggttctcctaatgtcaggattccccgcaggacgagggcgcatctggcctcccttggtctcgggggtgaacttcacagaaatggaaagtttatcgtgaatgaggaaagggcagtaaaacccaaccccatttactgggtggggagaaagctgccacccagggtgtccaaatcagctgggaaaggtcacgccctttgggtggtcactgggccttgggaacggggccagaacccagccaggtggagcagcagaagcctggcacatcacacatacggtccagccctcctcggtccctgaccctccctgttctgggagtgaaggactgagacagggcactcaggtgttaaggttggggggtggtggggtggagggggcaggtacaaacccctgaggacggcctggagggaaggcagctgggtagacagcagcctccatgcccagggactcgggaaagatcaaagtgtgagccggaatgcgatgccagaggaagacgagggatggaagaggcagagaaccttgggcgctggggaggccaaatgaggtggctgagacggtagctccctcatccatccggcatctccaggcagaggagagcaaaggcctggccacccgcggctgcccgaaagccaccaggatgggatcctttgttttcatttccaaacccaaaggcccctcggctgggccggcgtctgatcccgactcaaagccacagggagcctcagctgggacgcaacctgagggcttggaaaatggaggacccagagccagttttagcagttgatgaataataaatgtaattaacatgatggaaaacagaagctggaggcccggctgaggccccagagagtgactcatcagctgcctccctgtcacttccggctgcccgggcccctcggcagggacaggtgccaggaggtgaggggcgccgagcccagacgaaggacaactggggcaggtctggctggggacaacagcccctccagaaccaacccccctcgttcggtcccagcagggcctgccctggtgctggggtccctgggccctgcagcacgcctctctggcctcaggtgctgcgcttgtaaagtgggagtgacagccacgctttggctgttgtcctctgggcactgtgtgagaatctgctgatgctcgtatggccgttagttctcaatcacgacaggactgggtgtcagaacctcccagggccatgggcagaggccgtgcagcccaacccacgctcccatggcgtccctggattggtcactgggatgctcaggtgagtctgaggccagggggtgccctccaggctctcagcaggtcctcggccttcccagggctgtaaacactggtggaaggtgggggcatgggagaggcatactggcctccaagaagcggtgagcagggaagggtgtgggcagctgctggaggagaatatgggtctgaggttagcgcagcccagggctccctctgacatctctgcccccatcttggtttcagggcactgcttttggcctagaagagcagaggagaaagaagcagaggagtgggaggaggagagcggggagaaaagaagggagaagggaggagaaggaagatggaggaagaggaaggagagggagaaagaggaggaagaggagaaggaagaggaaagagaagagggagagggagagggagaggagggagagaaggagaggcgagcaggaagaagaggaggagtgagaagagaaagaagcatgggaggaagagaaggaatgagggtactcaccaggcagccttcccagcaggccccatgccctgcctaagaggcaggcgggagccgtcctcagcatctcccaatggccgagtacaggggtgcttctgcctcatcatgatgggcctggtctgagggctccagtcctgcctgggctgcaaggctgcatggctgcatgggctatgagccaagttcctgcctggcaggccgcactcgagagacccaccccactcccctgcaggggcagaggggctgggagaagaagatgtttaggtcctgccaggaaggtcctctcaccacaaattccacctttatgggaaaatcaatgttattacctcctccatcttcccacacttgctgctggtctaaagcaatcacctcatgggcactgagccagaactgagccagcgctctggggtcactggcctgcccacccctgccttccgggagggccaggaagggaattggttggagagagtcagcatgcctagctctctgggtgcgaagagaggcccctggggccggttcattgggtccgagcaccagccatgtgatgcctcgctcacagcactagcaaggcaggcccctagtccacagggaggagggagatcttgcttaactacaagagcgttaaagtccgatgaggcagaagccacagggtttgatggaagacttcctggaggaggaggaaagaaaaagtgggaaatccagagaagctggcacggaagaggagcagcaaccaggcagagcagccagtgctccaggggccacgggagaagcaaaacaagtgggggtctctgagaacacggcccaggagcctaaagaagagacacaccacccccaaccaccgggctccggccctcggaaaagctgtgttgcctggctctgcacactactctgaatgttagtgtctcaaaacagtcaactttttcctttcaagagtcttctaaacgatagtttaactacctccatcaattggctggcaattccacgaacaaatggttctctgcttgtctcgaagttcaactacttttatttgtccccaagtatttggcaggaaccagttgcatcaataaagaaatgccaattttcaacagccacacgagatgcaggggttcagatggattttgtgtcggcagacagggcgcctggaggagctgttattaacagccagaggagacacgggggcaggcctgggagacagcactccagaatcagactagattaagaagatactgtaggcaccaagcctctaagcatcataaataatgctaaaattttagactgtggttgaactctctgctgtcacaatcgtttagatcatgatgcgtttgatgttttatagcaagatgacaaatatctttctcaactgctaagtgcagagagcccgttggaataaatccaaccaaactgcccaccacaggtaagtaggtggtgtcattaggaggagacttgggggggcggtggtgtcagaaatgcctcaggcagtgatttccaaaggcacgccccgaccgtgcagttcaggccatttttctcaaccctcgccagtttctggcacataatctcattgttggaagaggcagggtccaaactctgaataacacatggagtctgacaccctggctctcccctcagcaacaatgaagtcacagcagagccagagaaagggacagaaaaaacaatgcaggaaggacaatgtggtgaaatgtctaaccgtgaaacaggagccggtgcatgagagccacgggcaattctcctgggctcctggaagtagccctccaatcacaccagctggctccctgcccagacacaggctgcagggatgtccaggaacccagctgggatctcagagggcagacccagggtgctgggtttctagcatggaccctcagctgggcacagagagaagagagccacctgcttgctgggcccagaacgactccccacagttctcccagggtacaggctgtgcccactctgcagggaaaacaatgcccatcttacaatcctgccctgcagggggccccagaccaacacagctggctatctcttctctgagccagaccagggtgactcttgtggttgccagaaaatgccaactgcgggacatcaagagaagaggcaggtccaagggtctctctcccctgccctttgccttatgaggtctgatgccaagacctacgtcagggcactctatgcccccagtcttgccaacggtgagtgtttccactacccaggactggagtggccctgaggtgatggggggcgggcagggttctgctggaagccgacagcccaaccctggcaggggcagctgtccaggaggaaaatattctccccaagctttctcctcctcggagctgaactgtgacacctcagtaccaaccaatggcaaccctgggacaaaggagtgcttcctgcccttttgagacggagtctcattctgtcgcccaggctggagtgcagtggcacgatctcagctcactgcaacctctgcctcccgggttcattcaagagattctcctgcctcagcctcctgagtagctgggattacaggcacgcaccaccatgcccagttaatttttgtatttttagtagagatggggttttgccatgttggccaggttggtctcgaactcctaagctcaagtgatccacctgccttggcctcccaaagtgctgggacataagagacaggtggcgtgccttctagtcaaacaggggcctatgctcaaggccaggccagtggcacagttctcctccctggcagtgcagaagtggctgcccaaggacaggacatggagtcgaggttggaggggctgcttgagacgtcatggactgtttaccccacgtgcttcccctgaggagggaaaagtgcgacgtggacagggctcccataacctgggcacatctcacatgcatcacagccctgagggtgccccactagcaccttagtcctgtgcctcctggccttcctgccccctgcctccctctgggctgggcacctgagccgaggggtcctggctgttggtggccctgacttctggcaggaccctgaggagcagcaccagagcctgcagatcctgtcccagaggggccagacctcaggcataggcgggtccgagtaaagactcctcccctttgtgcacatgggcctgggagtgcgtgggcctaggccagggcgggctggcctctggtgtgggctggctgtgaggttcattgagcctccccagctgctctcactagcagggctgcccggcaatgcctctggggcccaggtcatttgctttagctccttgggagctctcagcaaaggagacaccccaggtgggaaggatccggctgagggatgcccaccacaggggtttcctctagtgtctgtgggtcacacagcccagcaccgtcctgaagaggctgtccccagctcgtgtggggtggctggcacccccgactgtcagcctgtcctgtgattaaatgagatcacaacctacagggtgctgccacccttaaggctgataaatgccatttataaactccctggagcaaatgccaaactttccaaggtggggttccaagaaaggttcttgtttttgtagagatggggtcttcctgtgttgcccaggctgggctcgaacccccggcctcaagtgatctccctgccgtggactaccaaagtactgggattacaggtgtgagccaagtgtctgccagagaggttcttaaatgatttgacactggcttttcctcaagcgtttctaaaccttctaaatgacaaccactgggacctgcgcaagacgagtgatcctggctggaaatgaacctctgaacctctccccagatgctcttctgttcatccctctgctgcctcaacttccccaggcacaaggggtctggactcttctccctgtcttccccacctcactcaatagcagctccatccttctggctgctcaaattcagacccctggagtcatcctggactcttcccacaacacccagccctgatgggctgctgagtcctgctggctctgccttcacaacctacccagggcctgcctgctccttccccatccactccaaccccagggctacaggagcctcctcctgggctcgctgctcctgacctggcccctccatctctgctttggacagtagccaaacagctggaccgtggccctcctctgctcggcccctcacctctctggccccacctcccaccttcagtcctctcctctgcccgagtctcctggctgtttctgttccctgacaccccagagctcagtccctcgcccactttgggtctcacttgactgtccgctctgtgcaaggctttcaacatcatcctactcaacactgtcaatcactcccaggactccctctactgccgtccccgcttttatttttccacagtcctggtcactattgaatgcactatgtattttacttctttatttgactgatttcccctctagagcttcacagatgggattccttctgttgtgtctccccagctcctagaagagtgcctggcacctgttgttactcagcacgtgtgtaatccggtgaggggcactggcaggctggaaatgacgaacactcaccagccaggtgacagggcaggtccatgggcagcctgacttcccaggatgggtggtgcatgatgggcacccatcagcctgcttggccgggagcagggagaggatcgggagacccaagctgtactccaggcaaaccctctgaatggtcaaattggagttgtctgaaatggacaaccctacaggtaatgtttagatggttctggccccacctatggcatctggaaacgatgtctgatcctgaagggatgatgagcctggttctactatctccaccaagcccagggagctcagccctggctctccaaggcctcctgagatggcaccttcagaaacacgccctggcatttaacatctttcgggtgaggctggcctttggccctgggaccacctgggaacggttgccacatgcacctcattacaacaccaacacgtgccccttatcagccagcccagtagtgcagacctgattcctcgataaccactgggctatcaggctcactggggttggtgaccacatccccaggaaatacggccgcctgcaagagtgcacagtcccggggaggccgccaccttgctcagacctgcacgtctttgcgcccagccaggctgaatccctggagggctgagtgaggagcccacccagtcctccttccccaccaccagggtaggaggcagccctgttccttcccttcactcaggagcatttatgagcgcctgctgtatgcctgactctgccacagagaaaacagtgttggggctgcagcaatggcccctggcttcctggctgaggccgaccttgacccagaggtggctgggggatctgagccccttcccaggcagtctctttccacttcatcaggcagaaacttcttcctcactagagctggcctgactctggtaacatgtcatttgtcatcataattcataatgcaataggtatttgtcctttttatgggtattttaaaactagaacttctctgcaagacaactgtgcctttccagtgccctgcactgagacagtaactaccgggttggaagaagcaggtctccttctgtggggcagagatcaccatggaaaagtggagcacaggccctggggccaaagatcagggttcaaagttggcctcccccactagcttgtggtgtgatcttggacaggttactgagcctctttgttcctcacctgtaaaaggggcttaataatagtccctgggcctggcacagtggctcatgcctgtaatcccagcactttaggaggccgaggtgggtggattacctgaggtcaggagttcgagaccagcctgaccaacatggtgaaaccccatctctactaaaaatatgaaaaattagccgggcatggtggagggtggggggcacctgtaatcccagctacttgggaggctgaggcagaagaattgcttgaacccgggaggcggaggttgcagtgagctgagattgctccattgcacttcaggctgggtgacagagtgagactctgtctcaaaaaaaaaaaagcctgggcgcggtggctcacgcctataatctcagcactttgggaggctgaggcgggtagatcatgaggtcaggagatcaagaccatcctggctaacacagtgaaaacccatctctactaaaaataaaataaaaaaaaaaaattagccgggcgtggtggcacacacctgtagtcccagctactcgggaggctgaggcaggagaatagcttgaacctgggatgcagaggttgcagtgagccgagattgtgccactgcactccagcctgggcaacagagcgagactccatctcaataaataaataaattaattaaataaataaaaatttaaaaataaataaataaaataatggtccccttactcagagggttgctctgagaattaaaccgatcttacctgtcacttaattatagacacgtgcagggcccacaccagaggctggtatgtggtcaggcctcggggaacgtccaccggggctgtccactggctctccccacagaactgtgctccacgggggctgggcctttcctccaccgctgcctccccagggcccagaacagcatctggcacacagtaggtgcatcataaatgtttgctgacaaaaccaatttcctaacatttttattacccaccaaagaaactcggtacccatctgcagtcactcctccctgctttctcccccacggtcctggaagctcattgccccatctctgtggacttgcctgttcttgacattttgcacaaatggaatcacacagcgtgtggctctctgacttctgtcactgaacaccatgttttcaagatctatcgattctgtcatatgtccctgtgcttcattttaaaaattactgaatactattccctcgtatggctagactgcacaccacactttatttatccgtgtaggagttggtggacatttggattcttttccactttggggagaatgtgagattgtaatttgccactcttgatacatgactgaacaagttaataaaaagatatttaaatagaaaaccaaaaattattattcatttaaatttattcataagattatatgcttatttatgattctatttcctacataattgctgtttataggtatgaacataattgccatgtacacaataccatgtgccatgataaatggcaaatttctttaaggatttaaatttaaaaagaaaacgacataaaaacaagtcaaagataggaaattttttgaaaacccaaataaagaaaagccttttaaactcttattccaaaaaaaaaaaaagtttgctgaacaaatgaatgggctgaaagaggagtgatctgacaggcaggtgcagggtgagggggtgcgcgtaatgggtgtaccatacgcacatgcgcatgcacacaagcacacagtgtgtcctcaggcagggagggtgagaagagtgtgtaatgggtgtacatatcacacacttgcgaacatgcgcgtgcacacacacacacagtatcctcaggcagggtgagaagagtgtgtaatgggtgtacgtaccacatgcacttgcatgcatacaagtgcacgcgcgtgcgcgcgcacacacacacacagtgtgtcctcaggcagggagggtgagaagagtgtgtaatgggtgtatatatcacacgcacttacgttcgtacatgggtgcgcgcacacatacaaagtgtgtcctcaggcgggtagggcgagaagagtgtaatgcatgtacatatcacacgcacatgcacacacacacgctgtatgtcctctggcaggcagggagaggggtgcgtgcaataagcgcatacaccacatacatgcatgcatgctctcaaggctgggacatggaacccagccaggctgggacagaaagcgcagcgccagcaccctggggatctctctccattcaaaatcatggacttcataaaagcataggctgtgggcagagcctcagaggtttaagcaggaaacagcgactgtgaggctgggatggaaaaggcagcgactgatacagccccggctgtgtcccggtaaggggccaggcagcggatgcatgccatgtggggcctgacttagtctagacactggctcaatgccactgggtggtggggactcagggcccctcctcctccccttccaccccctgcatccaatccacaggtgagcgctctcagcttcacctccaaactcaccctccagccccctccctcccatggccaagcctaccagtctgcccccatggtagcctcctcactgtcctccccacagccacctccgtccactcaccccccaaagccaagccccagctgggccaggcactccccagctcccagaaaccacttagtgtctcatggagacctggctgtgtggcccactcctctcttacccgccacaccccatccaccatgtctctctccacgtggcaagtgccggagatcctcacccctctcggcctcagctcaagggtcaccccattttcctggacaacattttatcacagtgtgtaatcctcccacttgtctgtctcctactttgggatgttggctgtgtgtccaggctgaggccagcccagcccttcagaaagctggaggtcaccacagtgaagtgcaacgcaggctccaggaccaacgccaaggttcaaatcctgcctccccctttagcccacagtgtgatgctggatggattactcagcctcctcaatggtcccatacacagagggttgcttcgaggattaaatggatcttgtccctcatttaactacacacatgcagagggcccagaccagaggctgacacatggtcagggctcaggaaatgtccactgggctgcctgctgcctcgctgctgaatcagcatgtatgaacctacagataaggcaccaggcctcgtttctccagagaccaaatgcactattttaatcagctcaacagtgttcccccaaatttatacatcaaagccccaatttacagtgcctcagaatgtgactatttggagacggtgctttaaacaggtgattaggctaaactgaggacattagggcaggcctaatccactctgactgttgtcctgatatgaggacatctgagcatatgagagagaccccagggatgcgtgcacacagaggaaaggccgcatgaggacatggcaagaaggcggcaagcccaggagagaggcctcagagagtagcagccctgccgatgccttgatcttggacttccagccaccagaagggtgagaaaacacatttctgttgcttaggccaccaaggctgtggtcttttgtggggcagccctagcacactcacacaggcaccttcaggccagagggtggaagaaaggaccccagatccaccagtgagtgtgtgaaccaccagggcctgcactgcccatgacctgagctctgaactcgagtcccaccaggctcaaagccaggacctcagaggacatcagacaggtgtgatgagtcccttcccccaagccagctctggccacagcctgctgcccaccaggagcggcctgaattattccccgtggcagaagagagaaatccacgacctctagcctgcctgcccctgcccccaccaccaaggaagggccgcctgtccaaaccacctggaccccgcagcctgttcgggattcatttctttcctcttcaaagcattacagattgattgccaagtcttgccgtaaatcaaaagacagtcactactcattacctacttagaattccccgagttcttcctgggaagccatttctcatctgtttgatctcggagccaccagcactatctccaggcacgccacccatcacggcagccgccagacacttttttcttctgggctcctttctcagcacctagatgaatttctacctttctccagctttaagaagagctgccaagataaatgattcaaagactccagctcatgctgaaaatatatggactgcttaaagcctattatgaatcagccaacactggggagagacgcactggctgcatcctcaccggacgggtcatcctggctgctaagacctagacccacccgggcacgtggacactctctggagtcttttcacccgtgggatcatgacacttgcccagcttcaaccagcaccaggtgcccatgccatccccaagcctctgcgacctctcagcacagggtggccgagagccccacagtcacatgctggcctagcagaagtgaggggtcccctgtttgcacagtgcatccaggaggaacttcggtccccagccttgaagctgggaccccttttgcaaaagcagcatgctctcagccacggctgctcaccacccagaggggagggcccagcgggcatcaggaccccgcaccgagggtggtgaggcctttctgccacctctgctgatagggtcccaggaccacggctttccgatgtgcctcccactgtccagtctatgcgccagtctccacagccatcagcaggccccacgaagggcatctagcccctcttatcttgctgggatggacagtaagaaagtaaaacagcaccagcaaagcccagccaggctccgactcaaccagccacccagacattggctgtgtgggggactagaccgccagggccctccagcaatgaactgcggtcaccttgggctggagaagtagctatggtgcacttcgccctagctgggatgcccaggagggccacctgtgccaccgtgctgcttctgaaggttgtgacatgggaagagttctatccccaggtgcagacatggaggtcagcaatcaccactcaccaatgaggggaccccaagtgctgtcacaggtgcatccacaaggcttgtggcacactcatggagggtggccccaggggaacactgctgcaccagtgccggatgactgtgggtgaggagggacacagactcatggaccctggggctctgcctccacaaaacgggcttttctaacaagagggtggaattcacatgaaggaagctggctggttctgtgggcagcagtgacaatgaccccagatccatttcccgctgtccccctgccaagttcctgcaggtgcaggagcccgggatgcatggcagtgacaatagcatttgtgcaggcagggcaggggcgtgctagcccaggccaagtctgaggcctgtcactgacatgggatggagcctgtgcccaccagcagcctggctcctgggcatctaggcctgttcaaaacctgtaacacggaagccaacagaaatccacagccagagggagctgcgagaggacggtggctgagtgggtggggccaggccagtttccctcctgctcagccacccccaagatgcttcctcaccctactctggggcagctgaagaaggcagctgtggccaggcccatggctccctcctggacagctgccagaggaagcacgaagacccacactgcccatcctccatgccacagacagagtccaaaccctcagcctgaaccacaaaggcagaggatggccttgtgcgggaggttcctgaggacgcaaactcagcttcacagccccggaacacagagcctgctgtcggagtatctaacagggatggggaggagcctcaactttggttttatcataaattacctccaggcttcaagagcagacatgcctgccggcaggtatggagacagcccttcctggatgaaaccattcatgtcatccacagaactcagagctaggaggagaaaaactcacggcccggaataattactcccgcagggagcgtctttcgcaccagcaggtgataggtctggatgaggattttctaaaaaccggcaccaaacctcacagcataatcactactgcctgcctgttctgggagccaaacctcaataactgctcctgcggggctgctcctcactagatgcgcccaggacttggagccacgccttctcacgggcagaaccagacaggacacagccacctccgaggtgggcgtctggtccacctgcccagctaaacaccctcccatctaccacgggctccttccggcatggaagaacaggaaaggctcctttagagtgggggaccagctccagaggcctggaggcacccacaggagtgaagctggccaggtagtggcatgcaaaacagaaaaaaaagtctttttttttccccagagctctcctatttttcttgaaatacatgaccctttcgactatcttttttttctcttttgatagagatgctggtatgagaaggctttctcatttatgaaagaaccaacagcatgaaagccatgaaaagagtcggcttcagtgctcggggaggtgacggggagcggtggggcctgtggcgtgcaccctgaacgaaagctatgtagcaagcaccacgctgctgctctgtggaaattccagcccacggttaccagctactctgattttcaggaaaagccaaaaaaatctgatttttcaaatttggttgacttcaatgaaccaaaataaagtgttaaaatacctattgcctgggccaaacggaaactgcgtgtgtactggatgtggcccagaggccaccagtatataaactctggcctttctcttgctagaaaattcttcctggagaatgagaggtggggacccagggtttccccacactccccaaccaagaccctgacgggacagaggcccccagaggctgcagtccactctcacaggggcctcgggggaaggcaggcagcaaatgggggtgtggccaaagccaactccaggtagctggcccactgtagagaagacatcttccatgtccaccgaggtgactcggtactgtctggaccacctggtgcaactcatagccccctcctcagctcctctggggtcgcccatcttgcacagtgaacctacaagcaacctaaaccgttcctccccctttcttctgggcctgagcaatttcagcagagccccgcatggtggggtcaatcagacagctcttggccagctgtgcagaaagagccagagaggtctcctgggtgaaaaatgagaggaaacctaaaaagatccaccagcccatgttttctcaggatccatgaggagagctcaccggagaagcctgcgccaaaacaggaagggaccaagccacaaaatgcacacaagaaaacagcagcagaacgagtgtgcagggtcacagcaggagaatgggagacaggcttgagtttctcactggtgcgcaagtggacatcatgagaggaagctaacagccccggatcacatccaggagacctagtacgtgaggaggaggaatttcaaagatgaccctgagatgcagaaagctttcactgctcagatgaaagaagtcggtcatagactatcgcaggtgctcacagggaccaccccaggcggtgtcccaatgtgcatggctccgatcccagcgggtgccacgttaccttctgaaactgataaggaagccacagagaaaccagggaatgaaatctgtccggggtgacatgatcaataattatatcacaggtctcaggtagcaggacccaaggggatgaatgcttgcctctgggagtgaccagggaggtaacagacaggaagcagagcatgtgatgcccccgcttgggtgcaggagtggccactgccactggcctgtccactgtgtgcagaccagccttgctggtggccaagctgcctctgtctccgcagatctgtcacatgcaccacctggtctctgtgttaggtgtgactgcttcttcttgactttttatcagtctaggtcagaacacacccgatgtgaactttatggcctgagttgctcgtccctccagaccccccgtgctgcctactggctgaagaacttggaggctaagcaagccccggcttgtgccccttcccaaggagcctgccttctcctggtcctcccagacagctggcaggattctaagccctgaagtgcagcccctgcccagaaaggcagtgagacagatcctcaggaaatactgttacttccaagaatcaatagtcctataagcatccagggcaagaaaatgaaaagttccctggaaagaaggaggaatatgatttgctaaagatctctggcaacaaaggagggaatggttttatggaacaaagagtcaatacccactgaagccaccattcacgcaggagacaacaaaagaaccctccaacaagcaaggcactgaaagtactgaatcaaaacttaaagcactcacacgagcaaagggaaaacatggtacaaaattgaggtccacattggattgagtgagacagtgctcactaaataaccgttggtaaaatgatggtaagacaatgcaaatgttgaaaataaaggaaaaagaagttatataataaaaaactagaaggtaggggaaagggagattataaagtaaaactgaggcaggaggcgggacttgactctggaggcggggctcggacaccagaccaaatggagaactagccaaaacaggtcccaggtaaaagcagctttccatcagacacgcccaccagtgcgccatgtcagtttaccattgtcatggcaacaccagggagttaccacccctttccatagcaatgacttgatgaaccaaaagttactaacccctccctaaaaatgtctgcataaactgccccttactctgcatgtaattaaaagtgggtataaatatgactgcaaaaccgccctgagctgcggctctcagcacactgcctgtaggtagccctgctctgcaggggtagtcacggagctgtcacaatgcctgaactgtaacaccgctgctttaataaagctgtttcttcctaccctactactggctcacccttgaattctttcctgggtgaagccaagaaccctcgtgggataagccccactttagggcttgcctgccttgcatcaaaactatgctaagtttctaattttttaaggaaaattttctagttttttaaggaaaattagaaacttaaaattgttaaattgttaaaattagaaaattaaaattgtttaacttttgaacataagtagaaaacagaaatacaggtctttttttcttgatttaaaggtgattctacatttaacatggcatacatataaaagtgagcaaaggaaatttcaccaaccttccaaagatagaaaaacttttttaaagccacaaaggaaaaaacagaaaccagaaaacacaaaataaggctgtagaaaagagaacagatgctgattatcactgtgaattcaaacagctctcctaacacggggaggctctccatttgaacaatgagtatgctgcaccttataaacaacctattttaaaaagttaaaaatacagggataagcaaagatatgccaggaaaatgtaacaacaacaacaaacatagcaacaccagtgtcaggcaaagtcagattcaagacatagattaaataggttaaaaggggtttcttgaaagctataaaaagcaaaatatataataaagacataacaatcatcaacttttatgcctcaaacaatttatcatggaaatgagtaagacaaaatctatcatgaatcacaaagaattataaaaccatctctctaaatcttagagcaaatatacaaaaataggggagggggcagaggactggaattagataataaacctgattcatgtacaccaaagtatatattctaaagataaaaactaaacactttccagtattccataaaatactgaccaaaatatttttaaataagccacgaagaaaaacttcaaaattaaaaaccaaaaagattcacaccagctgcattctctagctccaatggtgacagaactagcagctaaaaaccaaaaggtcaccaagaaaaattcaaccacatctactgggaaatgaaaagaaatacactaggttagttcttaggttcaaaaacaaatcactctagacataccaggatatagctaaggcagtattcaaaaataaactagccaaaatctatttattactaaagaggaaaaaataaaaaataaactaagattcaactaaacaagttaaaagacagatgcgtcaaaacaaggttcaggaagagaggagaaaggaattaataataaaactggaaatcaatgagtttgaccaacagtagaactgaaaaataaatttaagagctgattttatgaaaaggccaataaagaagataaaactctagcaattataatccatagagaaaaaacacaagttacattaggaatgagaaagaaaaaacagctacagatataaaggagatattttaaaaacataagattttaaaaatatatgagaataaaattggttacttggttacaatgtaaaatctttgatgaaaactaagactttataggaaaacatacttactgactctaaaagtgatgaatttggactaaaacaatcccataggaaaatctgaaaagttaccaaagaaatcttccccagagaaacaacagggtctgagagattcaaaggacttcatgccttcaagaaacagccaagccctatgctttccaagttgtttcagaaaacagaaaaacatgggggtgcttcccaaaacatgatctcaaaaaccttggtctcaaaatatggctaagagagttaaaggaaaaaaatatatagctcaatttcctattttgagcctgtataaaatgctagtgaaaaaataacaacaatggccaggcatggtggctcacgcctataatcccggcacttcgggaggccgtggcaggaggatcgcttgagtccaggagttggagaggcaatataatgagatcccaagtccacagaaaaataaaaaattagccaggcatggtggcacgtgcttctagtcccagctactccagaggctgaggggggaaggtcacttaagactgggaggttgaggttgcagtgaactgtgattgcaccactgccttccagcctgggcagtagagcaaaacactgtcataaaaaaataaataaataaataaataaataaaaaagcaacaacaagcaccataaggatgcttagtggatgtccatctgctccatgtgttatgcatacaggcatgcctcatcttaccgtgccttgctttctttttttagaaattgaaggtttgtggcaaccctgcgtttagcaagcctactggtgccatttttccaacagcatgtgttcactttgtgtgtgtcagcattttttagcaataaagtctttttaaattatggcatgtacattgattttttgagacataatgttattgcactcttaagagactacagtatactgcaaacataacttttatatgcactaggaaacacgaaaatttccaatatttgctttattgcagtagtctggagctgaagccgcaatatctctgaggtatacctgtatatcaattcattggatcctcctaatcctcctatgaagtgctattatttttttccagatgaggacactgaggtagtgttatcaatgtgcccaagctggtaatcagcagagctgggacccaaaccaagaacactagtctctggggaccatgctctacccactctactatactgcctcctaagtcggcttcttaaagtcctgataaaccacaataaagtagtgtgtactgggatgcctcactggctctgcaccaggacgtctggtcataaaattcatctaaggtgcacccagcacccaatcttggtttctaataccatcctccaataaaaggaaccgggctccttagtgaaatggctaactctgaggttggagcagggaacagacaagatgagcccggtgcaacccgcaatgccagaaaggaagggaatgctccaaaactaaaatgacggggtgcatcagaaagacacaggagtcaaacgaaagagccctcgatgcccaaagctggaaggatttgagcatcacagaatactggattataaagtataaaataaatatccatgggtctatacaagttttttaaaaaagaggccaggcgcagtggctcacacctgtaatcccagcactttgggaggctgaggtgggaggatcacttgagggcaagagtttgagaccagcctggccaacatggcaaaaccctgtctctactaaaaatacaaaaattagctgggcatggtggtgggcacctgtaaccccagctactcgagcggctgaagcaggagaatcatttgagcccaggacgtggaggtcgcagtgagccgagattgtaccactgcactccagcctcggtgatggagcgagactctgtctccaaaaaagaaaaaaaaaagaaagaaagtacaatttcaagtttaaaaaaaaaaggttgaacaaataaataaatgagggagaagagacaaatgtgtacagaaggatcacaaatagcataattcccatgccttaagtgtgggtggcacacagtgactgctttccaagagtacagaagagtgggtaggggagtgactttacagtggagaaacctgacaagcactaccttagccaggtgatcaaggtcaacatcatcagtgataagtcatgctgatgtgatgtgatgacaatggcacttctgtgctctccttcccagtaactcataactcctgtctcgctgaaagaaaaactaaaattgaaaggcattcttcaaagtacctagccatactcctcgaaagtgtcaaggtcatcaaaaccaaggcaattctaagaaactgtcacagcccagaggaggctaaggagatgtgacaatggaacgtgatatggtctcccagatgggatcctggaacaggaggagggcattaggtaaaagctaaggccgctggaataaagcatggacttaagataataattaagtatcaataacgtgcatccatggtaacaaatgttctaaagtaatgttaataactttactaatacataatagggaaaatgggtgccaggtacatggaactctctaatgttcctgtgacttttccgtaatccaaaactatcctaaaataaaaagtttactgattaaacacacacgtggaaaaggccaagggagatgctgaaaaggcagctgataaaattcgacatcctttcctgataaaatctagtaagccaggaagacaatgctacttccttaaactcgtgataaatatttatctgaaatcaacagtcagcatcaggtttttggcttttttttctctttttttttttaagagatggagtctcactctgtcgcccagatgggagtgcagtggtgtgatcatagctaactgccgccttggcttcctgggctcaagcaatcctcctgcctcagccttccaagtagctgggactataggggtgcgtcaccacactcagctaattaaaaacattttttttttttttttgtagaggcagaggtctcctatgttgcccaggctggtcttgaactcctggcctcaagcaatcctcctgccttggactcccaaagtgctgggactacaggcatgagtgtgtaattaccatgcctggcaatatcaggtttaatggtgaaacactagaggaaaatccataaagatgtccacagggagcacagttccttatgatttctaatatgattctccaggagcaatgcgcccagcatttgaaaagacaatgcctatttatgttagttttgccccaaaatctctagtccttcatcgaccaggttacacatttgcagaaagctcttctctctggttctctgtccagctttctggctggacaccaagttggttttctccacatgcccattcctcagttactcctagaggcaaaatgagccatccctgctttaagccacagggtcccacagcctgaccccgctgagagccccagtttcattctcggatccctggctctgtcgaatctctggtggagagactctccacactcgcctgtccccaactccctccctcatgccaagtggtgtagacacagcaggatggacgggcacacaggacctgccctgccagcacagggtaggctctggactaaggaattctccacccaagacagccctggctcttgggaagggctcagcttaaatccccctaggcatggccagccagggtgcaggactcaaggactgccctcctagggcttggacacgcagatggtgtttcctgactgctctcatgataggctggggcccgtctccaacagccaagcaagtgctagcagcaaacctactccaagccacctgaggcaaagagggtgtttctccagcccagacctgtgtctgaaggggccctcttctctgaatgggctgtgccagtgccctcacccatcaacacagccttcagagaaaggatgtgtctgctcagcgggtgcagggtcctgcccacggacacacagctggtccccagggcccatcacatccattcttacctgggggctccggtctcagaggccgcctggacccagacttgttccaaacagtcctcaaaactgcagcaccctttgtgggggtggctaaatggatggcagtctcactgatgcccacatttgtccaggctgagagcagattaggtcagactgtgcctggatgatggagactgcatctccaggacctcccggaggaagacggggacctcctagtgacttccctctccagtgaaacctgcgtcctctgcatgccctgtgaggggccccagccctggtcagagacacacaaggtgtctcaccatccacccagagtgcccggcaacacagcctcgtgtagccccacacgggaggaggaccatgtgggcacaggcatccgagatacagttcttcaggagtcgctgcacaggagggactcggatgaaaagcagagggtgccaggccgggcatagtggcttatgcctagaatcccagcactgtgggagaccaaggcagcaggaatgctagagctctggagttctagaccagcctgggcaacaaggcaaaactctatctctacgaaaaataaaaaattagctgggcaaggtagtgagcacctgtggtgccagttatttggggggctgaggcgggaggatcacttgagcccgggaggcagagattgcagcaagcagagatcgccccagaggggcgtcctctctgcggccccacgccccctgcagtcctgagcactgtgggctggcagggatgaggggggctgcccacagactctcccacctcctggctgtccttactggagtcaaagtttctagtcttttttatttacttattttgagatggagtctcgctctgttgcccaggctggaatgcagaggctcactgcaacctccacctcccaggttcaagtgattctcctgcctcagcctcccaagtagctgggactacaggcgcccgacacctagcccagctaattttttgtatttttagtagagacgcggtttcaccgcgttagccaggatggtctcgatctcctgactttgtgatctgcctgtctcggcctcccaaagtgctggaattacaggcatgagccaccacacccaacacccaaccagtttctagtcttaaaacaagaaaacaaacaaacaagcaaacaaaaagagaaaaaaatctgtcctgtttaacaagaatgcagcaaggattttgcaacctgctcccaggctggattcacggagagctccaaccccgcccccagcaccctcggctcgggtggctctgtatgggttggggggcgggtatgtatgtggtatgtcaatgggtgtggtacataccgtgtatgtgaggcatgtggtgggtggcgtgtgtatggtgtgtagtgtgtgtatggggatggtgggtacatgttgtgtgtggtgtgtagcatatgtggtatgtatggtgtggtgtgtgcatatggctgtggtgcatgtgtgtggtgtgaatgtgtatggctgtggtgtgtgcagggtattggtgtatgtggtgtgtggctgtatgtggcatgcgatgtgtggtgtgtaggtgaatgtggcatcagatgtgtggtgagtgtggtgtgtaggtgcatgtggcatgcgatgtgtggtgtgtgtggtgtgtaggtgcatgtggcatgagacgtgtggtatgtaggtgtgtgtggcaagtgatgtatggtgtgtgtggtgtgtatggcgtgtcatatgtatgcagtatgtggtatatgtgtggtgtgtgtatggtatgtggtatgtgggggttgtgtgtggaggtgtgtatgtgtggcgtacatggcgcatgatgtgtatgtgtggtgtgtgtgtggtgtggggtgtgtgtgtggtatgtggaacgagtgtggtgtgtgtgtggtgagtatggtgtgggcggtgtgtatgtgtgatgtgtgtggcgtgtgtgttgtgtgtggtatgtggcatgtgtggtgtgtatggtggaggtctgtggtgtgtggtgtgtggtatgtggcatgtgtatgtgctatgcagcatgtgtgttgtgtgaggtgtacgtagtgtgtatggtatgtgtgggggtgtgtgaggtgtgtgtggtatagggcatgtgtgtggtgtatgtggagtgcgcaggatgtgtggtatgtggtgtgtatggtgtggcgtgtgtgtcatgtgtgtggcatctggggcatgtgtctggttgggggagaccctcaggtcgtgtcccctctccccagcccatctgtactcgaggggcgctgggcacacagaatcacaacttgctccatgtggccaaagagtaagaaaagcaccaaggccttgaatgagaaggagcacagctgggcaagcccctcactcacaagggactgacggggacaggagctgcgattgagggctgtcgcctgtggcaggagcgcccagaaaagcccaggcctgtggagaagggtctccagtgggtcttggcctggaaggggacgccaccacacggtacccgtcacactacacagatcctctccctttcccatgattctcatgaccccccagaaacaaaagggccccaaatgccccattcacagctcagagagaaagagcataatttcaatcaaggtctcaggctgtcatacacatcgcgttattaatctccttgtggcaaatgtgagctgggactcgcttacacagccaatggagcatgctctaaattagcgtttgcaggtaatggatccggccgccagccccacgccagctggctacaagctgggtacgccactaacatgaaataataggaggcggaaaaacggatggcctgattgggcctgctgttagagcccaatttacccaacacggacgtcttattggtttaacacaatttactacacctcaattgcggaaaatgattttcattcctctgaaccctcaactcccaggcgccgcatgagggaggagtcttcataaatgccatccgctcgctcactttttttttttaacatgccttcaagattttataacaaatcatagataataaaacaaaaacagatgaggcttagaactggaggtccaggccaccatcgcttgagtcctggggtgggtggtgtgtccaccttcgagaaaaccagccctgactcctgccccgagtcctgaactgcagagctccctgccttcatgcccagtgtccctgtgcaaggctgaagccagccaggcccccagcagaaagtccagcaggtcttaaggatgcccaccttgctcacagggtgctgtcaacacatatagaagagcggctggtttcctttgaacccagtgagtcagcgattcacacagcagtgcagctgccccccagccttccctggtagcagttgagcctgtgttcaaagaggcacacccccgggtaaccaaaaacacgggctttagaagagatttttattccccgactagttaagaaaagaattctcaagttcccagtgacacagaagatggcagaaaaatcacttaaaaccttttcttctcttttccacccacatacatttcccgacacctacagtgggtcagacaccgcgcagataaatgagacatggtccccaagaaggcgcctccaggctctccaggacaaggaccacaaaactgcatcacatagtgatcctgccctggagagggagctcgaggcggaagaagtgtcagcccacctccctggctgcagatgtccccaggggcttcaacctggacactggcaatcggggcgcctcctcaaatctggccagggatactccatgatgtgacactttccccagacacccatcttcccaccatcttcagagggggtgacccctctctcccaactcggtcccctcaggaacagcctccatctcttgttcttcctgtctcagtccccgtacccacccccctgctctaagctctcaggggcccacagatcagatagcttccctggtgggcacggtttcccctccctatgtcctgtggcctgcagcaggtgggtgcacatggcaggtgcacagcatgggcagcaggtacacacgctgacccgatgccactcagcaccctgtgggaggctgctcctggctgagagcttcccggtgcactcggctgtggcctctggcttcgagctcatctctccaagagccactctggtccacgcaggaggcggcagcaaggccaacccagggtcttgggatgggggtggagggaaggtggagcagtttgtagacaggggtgacatctccccagagctcaggttcacgacaccctgcttccaacagcagccaagtacaacatgtggactctgtgtggatcctgacttgaacaaaccaatgctaaaaagagtttaggatcaatatggactagatattcatgacatgaaggagttacggttcgtttgtgataatgaatgtgatattggcatggtggttatgtaaaagtagaaaaaagttctcaccaactggaatacctactgaggtatttacaggtgctatgacacgatgtctaggatttggctttaaaatgctctagcaaacaaaactaaacacaaaaacctggtggggactttggggttcattatacttttctattattttggatactgaaatttcctgtttaaaaaaaaaaaaagacctccattacctggaaggcatgagggctaaggaacggcgggtattccaggtcccctggcccctgacccatagcccatgcagccctgtccccaggttgggcagggtcgggctctgggacgctgtggggagggaggctcagggcccctcccagtagccaccttgggagcaggactgcctgcagcacggggctcaagcagccagcatgcagaggacggcagggttccacactgggctcagctattcctgccccaatttctcagttatttttatttgaagcatcagctatgggtcactgtgattcaactcaagctgggacaggtttccggggcagtgccaatctgagggacccactgtccagcccacctcgctggaggagccccacaacacacttcccatcccagatcctcggagcgggcagggggtcctgggaatgctgggccacagacaccgcactgcagaaggagaccacgcagacgcaagtgctgggatagctctgcgagcccttctcagcctccccggctgacggagctgggcttctgattaacgtgtgttacacggcccctcccaggatgccaagcacctgggtcaggccattttaacctcctcctgggcggggtaaggagagaagcacaggcactgactgctcagaactccttccagggcaagaccttaaaaagacactcgtcccctaagcacagccacagcgaactgaagcatccaagcagcccactacgggccccatccgacctcggccctgcaccccactgatggcaggcaggccagcctgggagggtgatatggagccagcacccccagggccggggctctgaacagagcaggccctgaggacatctggggtggacttgggccctgcaaggggggtaagggataccagaaaccaagctctcacaaggacaggcaggaaaggaaagcccagagtgaggacatggggatggcagcctcttcagtgtcacctccccagagcttccaggtggtaccaacactggtgggaggtctcggaatgggggcctcctgccccaggacacgggtgggaagggagccactgaggcagtttgggtctgacccaaaggtttccttgtaccatgggtggcagcacactgacttctgggtcctggagcggggctgagctggccaggccacacccgccacggctgggcagccgccggaagctccccgggtgccactggctcgctgcagccctaataggagcagaaggccaatggagctctccagagctctttatgggccatttaaccatccctcaacccagtcgcccgagcacagcagacataatggcagtgtttacacataaaaacggcaagctgttttactggcggctttcagagtcataagagcagcaatttggtaaagtttcctgcaaatggcagaaacaaagtccgagagtagaatggtggggcactaaaccaccctgaaaagtcatcgaaaaccattacatcaaacactctgccaagagccagggaggcgggcgcagtcagaagaaaaataatctttgcttgtgatcctgaagccctgttcataatctccgctcacggtgtgtgtgccactgcggcgtctcatctgttactcactcagggaacataaattactgttttttaccttttaattttacccggagaaacatggtggcttacctttccaactcatattctttcattcccacttttacagccttcattacctggaggacggatattaagcaaagacatttgtattaagcagatcagtaacacagcgtgataaataacatacagcacttcttcaaaagcacctcttctttaaaaaggaaaaaaagaatgatatgtgcatgcagtggtacagacatgtgacaaattagaactttttaaaagctccaaaatccatacagtttatttaaactgctatgaagcacttccatttggaagccgataaatgccatgcctcaagttacagctcagaggccaccagcagcccgaggacagtgaggatttaaccacgaggtgcttggtgaatacttaatgccacgaaagctatgacgatcactaaaaggcctcctttgtttaactttcataaaacacggagagcattatctcgtacaacagagtacgctgcccatcaattacccttgtctgtttcctaacacaaaactgcaatgttcctgagcagacggtgggccatcctcatctttcaagacatgtgtttccttatttggtctcattcctccagtaaagcgggaaggtttggaagagaaattttcagaaaatggatgatggtaatcagtgtgtttgaaccacagttaaggacaaaagattctttaaaatgagctgagaactgctgggatatgaagaaggagcactctaccctcccagaattgggactttttgttggataatttcctgaggattagtgtccacgactgcatgatgggcaggtgccctaagctgaggaattggggcagagccccttctgtccctgccctgtgcccaccagggaacagaaaagagaacaatcactgtgtaaaacttcctacctctcacttggccctcagggattagagcccacctggaaacccttcatcctcacgcagttctctcgccacacagcaacactgctttccccactcaaccagagccggtgcctgacttacctcacggtgggcctcgctggagattttattggtatagcgcagaacctccagctccatatccgtcttaaacactcggcttcagagacagaagaacaaagcagcaaatcagtgactttcaggaggcactggctggacccctccagggagagctcagggcctaccacaccctgcacagcccagaaggcgtgttgtgcaaggccagagtggggccaccaaggcccaggagtgacaagctccatggaacagtctagaagaaaacctctagcagggagcagagctgctgcccaccttccctaacaccagccagcgggcagactgtttccagggataagatctggaagccgctgcggtgggagaagaagcctggttgctgcagcttgtcacaggctgcctccctcaacctcagtttccccatgcatggaagggggatgaaatctacatggcatggctactgggccataatcctaagcctgctgcctcccagggctctgtcctgttggctgaagaggcctcgtttcctccccacccccacccacctgcccacgggtgggtgacagggtcaggtgaagggacagaagccattccagtttcgtgtgtgctggtacaaatgtggaaacagctggacagcagacacagcaggagaccaggagcagagaagagggaggcagccacagatgagagggtggtctacgtgggcaggggagtcacaatcgagggaccctgctgtcccttcctggctgggctgtgcctcctgcaactggactcctgaggcttccaggtcctcccaacaaacttgtgttaatttgcccaaatgtggttaggtttctggtggttgcaatcaatctcacccgcgagtaagacccacagagaggagccaaataagtattcgttttctacctccacccatttaaaaaaaccctgggtccgcgggcacagaaagggcagccatgctgaggcattcagagcaccggcctgggagaaaggccctgggctccagttcagctccaccccttcccagcggtgtggccaagatccctactctgtgcctcggtttccccatctgaaaaacggagatatgaacactgttttcatcataggtttgcagtgagaacggagttggcatttttaaagcactaaggacagtgcctggcacacagtaagtgctgtgtacacttgttccagaaaccaagcgaaatgcaaagcctgcagacaccacgtcatccatacttcccaccccaaagccaggtggaatgctctgatgtccttaggtaggacatcttgattctcatcaaaacattactccccagtattcatgacaggcccacaaagctagagaaatctcagcaggcaaacgcagcttcccttcactttaaattgccatttactggggacccgccgcatggtgggtcctgtaagttgcagtggatgctgggtgcactgcccaactcatcccctgaggccacacccctctactggtctccttgattcgatggagggagccaagactcagctccctcgcttcagctggggacatctctgggggccactccagcaccaaaactccccatgggagcagctgagatgcccttgtgacagcatcgcagcccaagcctgctcccttactctgacacacacgctgatcctgagagcactcctcaatacgcttcctgcctacttggctcacagactcagcttcccatggaacccaacctagaacaggtactaccttcccattttacagatagcgacactgagacttaactgagacaatgtcaaagagcgcatgacccactctgttacactcaccccctttttgttgcactccatgcaaaaattatagaaccctacacccagacaaactactaaccaaatacagaaggaaactagtcctttttagacattcaaaaactcagaaattggggaagtacttaaggatgtactccagcagagagagaagggtagaagggtggggagagggagaaagcacaagccaataaagagaaggaggtgatataatgggatatttttaaaaactggagtcaatccaaaagtataattagacactggacagcaagcctagaaagcaatcagtagaaattagaactccaagtatgtggctctgagaaaaacatccacaaaaagaatggcatggattcctttctgcagataaaatcaataggaagcttaaagctcttagtgatatggtgaagaagatatgtttcttctctcaataagaaagacgaaaggcaaattaaaactctaggaacaacaaaacaaaacagatatatgtatgaaggctgcatttattcacatggtaccaaagtaacaccaggtagattactctccaggtcaagggggaaaatgtaacccagtgatcagtcttagcatcactgattgtgggtcaactaagtataatttgtgtctgaatgcagtgcaataagaaatacacatcacctgggatgtattctggcaaatgttttaaacttctatggctttagatctaacttccagtttgcaggaaatatggggatagaagaacaagctaaccaccaacacaagcgaacaaccatacaaatccagaattgggatgctgtggtacaactggtccagcctttcagtatctggggggaaaaccatcacaatacccaggtaagagatagaactatattggccacgtccaggatgtcttatggacaactggaggaattcctgtttatgtgaactttctaactttcagcaatgcatgtatatatgttgcttttgtactaatgaaaaaaaaaaaagaaataaaaatttttttctaataaaaaaaccattctttaaacagagaataaactaaaatatggagtgattttgtatagctggtggttatataagaaaaacagtctaggccgggcgcggtggctcaagcctgtaatcccagcactttgggaggccgaggcgggcagatcacgaggtcaggagatcaagactatcctggctaacacggtgaaaccccatctctactaaaaatacaaaaaattagctgggcatggtggcgggcgcctgtagtcccagctactcgggaggctgaggcaggagaatggtgtgaacccaggaggcggagcttgcagtgagccgagatcacgccactgcactccagcctgggtgacagagcaagactccgtctcaaaaaaaaaaaaaaagaaagaaagaaagaaaaagaaaaacagtttatgtgctcttgatgctaggagcctcctcttgagggaggccctgggcttgtgacatccgacccaaagagaaggcactcccgccctgatacattccttagttctgcatagaccacggtcacagtcatcatagaaacacagttttatggcttttttttttaaccttttagagttaatgtctcccccaaacaggtaagatttactgctcacataaatgcaatggaaatattacaaaccctaacaaggaaacagcaacagaagtcgggaggtaaagacgggttggagaaaagatgtgtagagagagcagggccccatctgtgcagcctcagctcacccagggcaaaggcaagatggggtggaaagttcacggagcaagaactaaaggaggctcaaatgtaggacaagaaggcaaatggaacccatggaagaaccagcaataaacatatgatgaaaagatgggtggaggtgacagaaatggcccaaagaattcgctttggggaggggtggtgtggagagagatgagctggcaggagtcgctggtttcatgataacctagctttcccgtactgattttgtactagtggctttttaaaccaagggtacatattgctttgatagcactttaaaaaccttaatgaggtgctgtccataatggtaaatgtccattcattcatttcacatcactaataagtaagtgttagctggatgtaccaggcaccggtgatggagtggagtgaaagggccacgtcctcccctaatggagcgcagagaccatggagagacggatacagcgcgagtaaacacacaatgatggagtggaaggagggctgctaagagcaggagccggggtgctatgtgagggaatgatggagaggcacgagccctttcggtttggggctggccacccggtgagggaggtctgtaatactgagagacctggagaatggaggtgggcaacccagctgagtccctctgcacaaggcagagagttcccggtgcaccccctggccagctccttttcctttactaaagatgacttacctgcaccaaagctcccaaaggcccacccgtgactctcacaaaggtatcaatgcaaacactctcaagatcagcaaagctggagtgtctgaggatgcagaccagcacccacccctctgttgggagcaaagctggggtgtctgaggacgcagaccagcactcgctcctctgtcaaagggcacctctcctgcatctcctcttcctcctcctcggcctggccaagagcccacctgagctggcctccatcgaggcagcccagacagaggccccgaggcaggcgaggatggcgggaatgcgaggggcctggtggctcccccactcccatcagaggcagcaagcccttgggaacttcaagggagcagcccatgccagccagccgctgactcacacggtctccgtgacgctgcacagctgggacagccagccatttgtcactgggaaacgaggcgggcaccctgcagcgcagcgacaccttcccgagaccacagaaccttctggggaatgtggaaaaaacaaacccacaagcccagggagactttctcgaatgaacgccctttctctcggcggaggcagccctaaagcctgacagcatgctgttaatcatcatgaaggtgtctctgatgccgccgtatggcgggtgcagtcccattatctgggaccaggcacttgctcctgtccccagagggtgacagttcagagccatgggcaggacaggggccagcagctcaggctcccgaggtccgaacccacttgtggtccctcaggtgtcattcccactgccaccctctatgacgccagcccggggaacccgctgtcagggagcaggtctctcttctctcaaatgcagtgatgatcactgggtgacagcatgggtgagggccaggatctcccgccctccaaccccttactttctcctggagccgccctctgccttcattcggcttagatccctggcccttctctatggccactactgttgccagtgctgtagactcctcagccctgtgcccacccatccccacaggctcggcctgtgcctgctccaggagcactgagcactgccaggggaagtcatgcactggcaatggccaagcaagccccagtcacctcagcgaggccccagctctgccgtgagctgcaggggaacccgcaggagggctattctcaacttcccgcaccttccgaagatatctacccccaacttctgccccccacgggagccgccacagatgaatgaattccactcctacttcttggagcgcgcagcagccagcagatgggtccactctcacctctcctcctccaaactcccaggactccccatctgtcctctcctccctcccttttaagggaaggtgcatcctcttcccaagctcacacgcccacctggggatcccagctccaacctccaccagctcctgctagaagctccatggccaccgaaacagcttcctctacaagtgaagaatcctcccctcacttgcctccttctcctcttccagtcaagcctcccctacgctgcctgccaggccctaaccgtccttgccttgggggaggagggaaagcagcttttgcgttctattttgaacttcctccccatctcctcccctctcctctcccctctttgcttctctcttcacccccatcatgctgccagccctcccctccccttctcgcagaaggcgtggttccctctgcctctccctgctttccctctgcacccacctgtgggtcctgggtgccctggagctcagtgtgcgagaacccccaccgtgcccccatctcaatgaggctctgccatcttcctgctgcttcagcagagacccgggcgtcatcctagacgccctctcccatcacatccatccgctgcttcccacatccaattcacggccaagggctgccactccccctccacgacctccctcaggcccccccatttctctctatccagccccagcctctctggcctggacaagccctccagcctctaggcctccagcccacctgccctgatagcagctggggatctttaggaaatgcaaaccttatcaggcttcccctcgtttccagtggcctttaggtttccagtggcctcaggatgaaggtaaacctctagtagagcacaactcacgtaggtgcaggccatctccaccactcaccccatgtgctctcccagcctcctccctcctctgcctggaacttgttcctgcccacctctagcacccacccgaaacacacttttctaggggtcggagacgacccccttctaccctcccaccctgggctaaatcccttctctgtgttccctgggtagtctagacgaatcctcagaaacctctaacacttagaattcttttaatttaagtctcttctgaaaggccatatatagtcctggaagacagggtcccagcaccggcacagacacacagtaactatgtgtcatcaaagctacctgtccttccaccgaagccagacaacagctcatttccaacaaggagagctgatggcctcatttcaaagagaaaaggaggcctctccacccaaccttccccaccccatggcagcatgggatgttgccaaaccgggcacagcaggggcaaagcctcctcaggctccagcagcccaaaatccctctgccactgcctcgtcccagtcccacaggtaggaagagcagcccagggtggaccacaggagcccacactcccaggctctccactctgcctcccactgcagctggggcatcctcctatggtgatgagcaggaagaggtcgtaatctgccaaaggagaaaggaccacatcctcctcccagcagaggtgataatcatctctgccatcgaggcccagggacctacttgcttttctaatcttactttgggggaagtggaaaaaaaaaatcaaactgaaccagggcaaattattctacaaaggcagttctctgatgaaaccagcctggctgggctttggcctggcccaattgaatctatgcttaaatagacgtctgctgtgtgctggcttaaccaattatccgtagggcactctgggcctgaagtctcacccaggcgccaggcatagagggatgcaccccagcctggcctggttatctcacagcacaaacaccagaaactgtttttaagataactgtagaaaagaacaggattttccagcattccgcgcagtttctccctgtcttcaggaggaatgcaccaccctgaatatgatgagcccatttccagtgttcttgagcatgaacagatgaggacaaaagggtgccccagcctccgtgggtccaccggcccctggagtgagagatgcatggtcacactcagtcccagccttgtctgccccaggggatgtgtggggtggttgttagaagtatgatctacaaggctgacagccccatgagaggacaaaggccacctcctccaggaagcaacagagaatcatggctcaggacaggatgacaaagatgccacctaagaagtttgagcaggccaggcatggtggctctcacttgtaatcccggcaccttgggaggccaaggctagaggatctaaggccaaggctgagcacaggaattcgaggccagcctgggcatcacagtgataacctgtgtctacaaaacatttaaaaatcagccagatggccaggcacagtggctcatgcctgtaatcccggcactttgggaggccgaggcaggtggatcacctgaggtcggaagttcaagaccagcctgaccaacatgcaggaaccccgtctctactaaaaatacaaaagtagccgggcatggtggcacatgcctgtaatcccagctactcgggaggctgaggcagaagagtcgcttgaacctgggaggcggaagttgcagtgagccaagattgagccattgcactccagcctgggcaacaagaacaaaactccatctcaaaaaaaaaaaaaaaaatcagctaggcatgggagtgtgcacctgtagtctcagctactcgggaggctgaggcgggaggatgacctgagcctgggagtccgaggttgtagtgagccatgattacaacactgcattccagcctgggcaagagcataagaccctgtctctaaaaagagaacttggggcagaagtcagctcaggctctttggccaggaaaaaacgtgccaggaaatgtgggcactgcacagcctcacagagagtccccagctcatggccacgctgtgggcatcaacatgcctggaggctgctcaaacagacagggaggctgggaggcaaagtctcctaccccatgtaggcctactctcctgctacagaccaaaaatcacaaaaagtagatgaggcaaagatgtacttgtgcaaccttatttttttccttaaacattcacaagtcacagcactgcctctgagcattaaaccctgaattaagatatcaattaactgagatctaaacactccactgattaaaatagtagtgagacaaggatgaaggatttccaaaatcagcctctaagcatcaaagtggcaccgtgttgaacaaaactcatttaaagggccaggaattccatctctcctggagatggatgtgcagggaatgattctattggagccaggtgggcgggaattcaacaccactgaacccgcaacaactatccctcccacactccatgacccagtgatgcaaaggataaaatcccacaaggggaaggacagaaagaaaagagctggttggaattacatatcctctggggaatcaatcaataagtcctctccaagaaaccaaagccatgaagaaaatgatggtttagctcagctgcgagctgagtgtgcctgaaacctagccagggacgggcagacgtggggcagaggtccacctccacgctggaccagggcctggccacgcctttccttctgtctgatgctcccacatccatctcctgcctcctggcgcgcagtgactcaagttctcactctcccctaggagtcccacttcccatgtggctttcttgctggcgtagggttaaatgcctattcatgaggacacaaagatgagcaatgctactggaatccttttcacagacacaccgagaatttaggtcatcatctacgtatcttttctaatttgggacatgttacccaggatgtagaatcctgggacacgtctacctgtgaaccaaccacagcttcccatctcctgtgcacacagagaggccggggagcagaaatagacatgttacccaccgcctgattaatgcatgcaggacacttttcgttctgtgtaattaacagctctaaaaccggcagatgactcaatttaacacagtctcgcttaaaacccaagaaggcacacggcaattgctgacacgcctgctctcccctgacgcttccagaggtacttaaccgaaacccaaggcactgagctatcaggtggtatgaaagcatctccttttatttcccaccttgccttcagatcaatttaatcatctgcaaaacagtaaagcagaaccacagcctaaattatggaagtaagatgcctgctcttttgaagtttcaacttttgaccttcacattcaaactgcactacccagcacaagaaaagaaattatccagttatgatctcatgtttgtggggaagagtatgattatagaggaatttacaggcaatcaaaaaggcgctccttgagagaatggaaaacaataaaacagtcacaggaaggaaatgaatgacagccgaacaaaaatgagaaagcgagtttgcctgtgctaggagaggctgcttgctgccttccaatcaagacaggctcctgaggaaccctgtgtccccagccaagctgctagcagaagctggggtgcatgtgggtgccaaggaagccaagcatctgccccctggttctccaccctactataccctggccccagcacaagaccattccaagggtgctggaccgtacgttcagtgggaccagcagtgagctgggaggatgactgacactcaggcagccccactccacgggtgccccctcagagctgcaaggagcagtgcaagagcctgggatcaacagtctgggctcaactggcattttcttgggcaagtcactaacttccctgtacctcagtttcttcatctgtagcatggaaataactagaacacttacctaatacaccacaaatatctttaaatacagtgacatgtgttaagtgcttagcacaacaccttgtacacatggagtctcaacaggtgacagtcagtgttatcaagatgtgccaggctgcagcctggctaacatgatgaaaccccatctctactaaaaatgcaaaaagtagccgggcatggtggtgcgcacctgtagtggggaggcgggggctgaggcacaagaatcacgtgaacccgggaggcggaggttgcagtgagccaagatcatgccattgtactccagcctgggtgacagagcaagacttcatctcaaaaaaaaagtgccaggctgggtgcggtggctcacgcctataatcccaacactttgggaggctgaggtaggaggatctcttaaggccaggagttcgaggccagcctgggcaacacaggagaccccatctctacaaaaaacagaaaaattagctggatgtggtggcgtgtacctggagtcacagctacttggaaggctgaggtgggaggatcgcctgagcccaggaggtcaaggctgcagcaagctacgatcatgccactgtactccagcctgagagacaaagtgagatcctgtctcttaaaaaaaaaaaaaaaaagacatgccagtccttcacttatactctcattcaatctttgagcctactttgcaggtgaggaaactgaggctgggtgaatcttcacatccgtaccatgagttaggtttcaccacatctccgttttacagatcaagaagctgaggctcagaaaagtcaagtgacttcctgagcagggaggagatagggctagaattcacatgtgcccgagttgatggtttcctgttatccccataaccctcccacagagagagggtggtgaaggcattcaagacctaagggcaaaagatgagtccctgagtcgtaatctaacatcatggaaagcccacccattcctgttaataaaggacccgcccgctgccccacacagcatccttccttcagtgccccagggagtgtgatgatcatgactacagtggacccaccgagagtgactgggacccaggctattaaaacatacccctgagcagcagggacaatgtgacatttctaaaatggttctactgccatcaactttctgctgcttgctttaataaagttgggaggtatgcttaggaacgcgggctcgacctcaaagcctcgaaaatgtcacttgaattaaagcatgcttctttgaaagtgacgaattaatgacttatcccttaggagatggcaggagtacaggacccagccatggtctccaaggcacccaagctgtaagtgaccacaagggaatgtcccatgtgaggcagtataagtggacatggcccattctaagtacccaggatttattcttctgccaaatgggggctacagataggacaggctctctggtttctcttcagatcctatgaatcatttgccttttacggacaagtcaggcatttgttactttatttttttgagacaaggtctcgctctgtcactcaggctggagtatggtagcataatcatggctcactgcagcctcgacctcctgggctcaagcgatcctcctgcctcagcctcccaagaagctaggactataggagtccaatgccgtgttaggctaattttttaaaattttgtttttgtagagatgggatctctctatgttgctcaggctggtctcaaactcccggcctcaagtgattctctcgtgtttgtctcccaaagtgctgggattacaggcgtgagccaccagcttggctttgttactttataaaaacaagaggtggctgtgaacttgaagaacaccagccctgtcttcacagagtgtggctgtgaggggcgtcggacccactggcctctaaccccgagggtcagtattagcgcctgtcatcggccctcagttctccacccccagctcagccctctctcccactggcacctacctcagactcaacacaccccaagtcccagatctgccccggtatctggccctcccagttgtccccatctcagtgacacaccacctagctatgcgggacaaaaacctggagtcaccttcaactctgcccttcactcacgcatcataaccggtccctcccaggagctttccctcttgactgcggcttcaccactcagatctgtcctgccacagccctccactgccagctggacccctgcaacagcctcctaacttgccacctgttcccacacttgccctacagctgggtctctagtctgaggccaaaatgatttcttattttttattttattttttttgagacagagtcttgctctgtcgcccaggctggagtacagtggcgtgatctcagctcactgcaacctccgcttcccaggttcacaccattctcctgcctcagtctccctaagagctgggactacaggtgcccgccaccatgccctgctaatttttggtatttttagtagagacggggtttcactgtgttagccaggatggtctcgatctcctgacctcatgatccacccacctcggcctcccaaagtgctgggattataggcctgagccacctcacccggctcgaaatgattttttaaatgcaaacccaattctaccattctcctgcttaaacccttcaagggtttcctgtgtttcccattcctctcaagaaaaagtcaaaacggacaccaaggcccacccagccactgcctgtctctccaactgttctcgggctctgctccctggctccgcactggccacacagagccaccaccctttctcttgtttctgtgaacgagtggtccttttgccagggtcactctctcctactccttctttttccacagccgatgcccattcatctttcaggatacctccttggtcccaagctctaagacgaggcgagtcagagctcccagctagacaggaaagaaaatgtgatcatacagacttagggtcatatgtgagaaggctacacatctccttggcaagtgatgatgtggcaaaggcctggccttgcctctcttctacattctcagtacgtgcagccatccatcaaagaaaaaatgccttgctgctgtcaaagagcaatgcgatggcttaggaagaaaactggtggcacactgggatgcgagggccacctccagggcccacagaggtggcgcccagcataagacagctcactttgtaggcagctagtagaagccagttgtgcagcaggtaagggctaacagtatcaccatgggaaggaagaaggtgacagaagaatgcgtagaacagaatgccacctttgtcaagacacatgcgtgacatgtttacctttctggcaatgggattatgtgttatgtttatttctgcccttttcaccatctacctcgtgctggagctatctaagtttggtttacttatggtaggagtttttgtaagattgcaaataagggaaataagtttaactgatgtttaagtgactcacgtcctttcaaaaaaagtacggccagtcaaccaacaacaaagaacaagcaaaacagaaaaggctatgggagaaggttctgggaatctgctttctgaggggctctctgagacggtgtgggcaggaacaacagggcattccatccccatgagccgagcacaacaaacaggcaaggtgaccacaggccgtactcaccactcaacgatctctgggtgaagaatggtattgttgacttcgaacctgtagggcgaaaagaaatcaagcccattaatccaacggtctgtcatgtcccagcaagaactacctcattcaagacatgcacacgtgatgcattaaagagggtcccacactttaatttcatgacttcctgacccacaaaaggcctgttgatcccttccttcagcagacctggcagcctgggccatgtcctccaaatgcagtcagttggagagcaagctttatggctacaaaacaccagccctgatccccactaggcagacagcatagtctcttgtgtcaagtatatcaaaatacacacaataggagtaccagaaggaaagaatgcagagaaagcaaaaacctcaccaatttgatgaaaaacattaatctacatatccataaagctccatgaactccaagtaggataaattcaaagatatccacacctagacacatgataatcaaactgtcaaaaaagtatcttgaaagcagcaagagaaaagtattaataattcatcacttacaagggatcctcaattagattattagctgatttctcatcaaaacctatggtggagagaaggcagtgggatgacatttaaagtgctgaaagattaaaaaaaaaagtccaccaagaattccatatccagcaaagccattattaataaatgagggagaactacaacatcccagataagcaaaacccaagagaatttattactagcagacctaccctgaaagaaaaaccaaagggaattgtttcaaataaaatgaaaaggtactgcagagtaacctgaatccacgtgaagagaaagagagcactggcaatggtaaccatacagataaatataaagacagtataaatgtattttttgtttgtaactccttttctctcctgacttaaaagacaactgaataaagcgataattgtaaatctgtattgataagtacaaaatgaataaagacgcaatccacatgccataacagcacaaaagagaatgaggaaaaggagacatataggggcaagcttttgcatgctatttaaattaagctgacattaatgcaaactagattttcaagtttaagtagtcaattgtaatccccataatcattaagaaaacagctaaaacatacagaaaaggaaatgagaaaccaaaatgtgacaataaaaaaaaaatcaaacacaaaaaaatgtaatggagaaagtgaggaacaaaaatgttataagacatatagaaaactaattttaaaatggtagagtttttccttatcaataattactttagatgtaaatggattaaattctccaattacaaggcaaggattggcgaatgaattctttttttttttttaattttaagttcaggggtacatgtgcaggtttcttacataggtaaacttgtgtaatggggctttgttgtacagattattctgccacctaggtattaagtctagtgcccattagttattttgctatttttcctgatcctcttcctcctcccaccctccaccttccaataggccccagtgtgtgttgtcgccctctatgtgtccatgtgttctcatcatttagctcccacttgtaagtgagaacatgtggcatttggttttctgttcctgcattagtttgctgaggataacagcctccagctccatccatgttcttgcaaaggacatgatctcattcttttttatggttgcatagtattccatggtgcataccataccacattttctttatccagtctaccactgatgggcatttaggttgattccatgtgtttgctattgtgaatagtgctgcagcgaacatacacatgcatgtgttgttagaacaatttatattcctttgggtgtatactcagtaacgggattgctgggttgaatggtatttctgtttttaggtctttgcggaattgccacgctgtcttccacaatggtttaactaatttacactcccaccaccagtgtgtaagtgttcctttttctctgcaaccttgccagcatctgttactttttgactttttaataaaagccagacagaatgattttttaaaatatgatccaattatatgctctaaagagacacactttagattcaaagacacaaataggttgaaagtaaaatgatgagaaacgatatgctacacaaacagaaacgaaagtggaactagaatggctatactaacatcagacaaaataagccctaagatacaaagttttactaaagacaaagaagggcattttataacgataattaggtcaatccacaaagaagataaaacaattacaaatatatgcacataacagagccctaagatgtatgtatcaaaaactaacaaaattggagagagaaactgacaatagttggagacgtcaataatctactttcggtaatgaataaaacaattagacagaagattaaaaaggaaacagaagacctgaacaaaaacgcggtggctcacgcctgtaatcgcagcactttgggaggccaaggcgggtggatcacgaggtcaggagatccagaccatcctggccaatatggtgaaaacccgtctctactgaaaacacaaaaattagcagagcatggtggtgagcgcctgtaatcccagctactcaggaggctgaggcaagagaatcgcttgaaccgaggaggcggagattgcagtgagccaagatcgcaccactgcactccagcctggcgacacagcaagactccgtttcaaaaaatatatatatatagcgtgtgtgtgtgtgtgtgtgtgtgtgtgtatatcaaaaacctaacacgtagctctaaaatactcagccaatagcagcagaacagccattttctcaagtgcacatggatcattctccaggatacactttatgttaggtcacaaaacaagttccaatacatttcaaaagactgaaatcacactaagcatgccctctgaccacaatggaatgaaataagaaatcagtaacataaggaaaatagaaaaattgacaaatatgtagaaattaaacagtagactcctaaataaccaatggatcacgtatcaaaccttacaaaggaatgaaaaagggggaaattactactgactttacagaaataaaaaagtttataagggaatattataaataacatacagtaacaaattggataacctatttgaaacaaatccctaaagacacaaactattaaattgatataagaaatagaaaatctaggctgggcgcagtggctcatgcctgcagtcccagcactttgggaggctaaggcgggcagatcacctgaggtcaggagttcgagaccagcctggccaacattgcaaaaccccatctctacgaaaatacaaaaattagccgggcgtggtggcttgtgcctgtagtcccagctactcaggaggctgaggcaggagaattgcttgaacccaggaggctgagcatgcagtgagccgagatcgtgccattgcactccagcctgggtgacaagagtgaaactccatctcaaaaacaaaaaaaagaaagaaatagaaaatctaaacagaccttaacaagagatcaaatttgtaataaaaaacttctcataaagaaaagcccaggaccaaatgtcttctatgaaatgaatagaaattctatcaaatgtttaaagaattaacaccaatcttcataaactcttaccagaaaagggccaggtgcagtggctcatgcctgtaatcccagcactctgggaggcagaggtgggagaatggcttgaggtcaggagttcaagaccaacatggcaaaaccccatctctactaaaaataaaaaaaattagcccagcgtgatggtgcacacgtgtaatcccagctacttaggaggctgaggcaggagaatcacatggacccaggaggcggaggtgcagtgagctgagatcacaccactgcactccagcctgggagatagagagactccatctcaaaacaaacaaataaacaacaacaacaacaacaaaaacagaaaaggaggcaatacttttcaaccactctacaaggtcagtattaccttgatgctaagctagacaaagacaccttaagaaaacaaaattacacacccaaattccttgcgaatagagacaaaaatttttcaacaaaacactagcaaacagaatccagcaacatataaaaaggatatatatacatcatgaccaagtgggattttttcccaggaatacaagattccttcaacatacaaaaagaaatcaatgtaacacatcaatcatattaatagaacacataataaaaccatatgcttgtataaatagatggagaaaaataaactgataaaatcaaacaccttttcataataaatactcaatgaactagggagggaagggaacttcttcaacttgataaagagcatctacaaaaaactccctcaactaacatcatagcatactgaatggtaaaagactaaaagctttcccctaagatgaggaacaatgcaagcatgtctgctgtctccaattctattcaactctgtactggaggttctagccaaggcaaacaggcaagaaaagacatgaaaggcatccagacgaccctgcaattccacttctaggtatatacccaagggaactgaaagcatatgttcacacaagaagtctgacatctatgctcatagcagcattactcagaacagccaaaagttggaagcaacccaggtgtccaccaactgatgaatggacaaacgaaatgtggtacgtatccatagaaaaaaatatttttcagccataaaacaaagtagtagtgacagaataagcaagcagggaaatcaggaaagatatagaagatataaacaagaaattaaccaacttgacgtaattgacatatacagaacactatggcccataactgcagaatacatgctttctttaagtgtatgtgaacatttatcataatggtcacgtgctggaagtttcaacatattttaaagggctgagatgcagagaacattcattaatcacagtagaattaaatgagaaatcaaaaaatatccatggctcaaagataaaaatacaatgaaattagaaaataacaatatgaaatatcataacctgtgagaaatgcagctaaagcagtgcttacaggaaaactcatagctctaaacatacacagcagaaaagaacactgaaaatcagcgatctaaacttccatcctaagaatgacccttgaagaaagcaatgaaataaaaaggaaccatataagaaaaatctacaaagccaaaagctgctcttcgataagatgaacatcattgaaaaggtgaccccaggagacaaaaggatcaggtcagagcacatctctgacacaagagaaccctgtgtgacacagagctcaagctggagaacaaggtagcctagcacaagctataggcctcagcagagaagcctcggcaagacttcaactctctggattccaagacctgctccttagccaggtgtggtggctcacacctgtaatcccaacagtttgggaggccaaggcagaaagatcacttgagcccaggagttcaagaccagcctgggcaatgtggcgagactttgtctctacaaaaaatttaaaaattatctgggtgtgttggcgcacacctatagtcccaactattcagaaggctaaggtgggaagatcgcttgagcccaggaggttgaggctatagtgattcatgattgcaccactgtactccagcagcctgggcaagagtgactcttgcccagtctctttaaaaaagcctgtctctttaaaaaagaaaaaaagacctgccccatcttagggaaggatagcacacacaagcacacgcagggtcgtgacctcctgtcctcctgccagccagggaccctccatggcttcgttaatggtgttgaaaacacctatgtaatgccatggttgtgaggccagcagcccttctagctgagccaactgaacaggggcagggacaggggagagaagagagaagggggtaacagcagactgagaggattccagatgtctgaagctttcaggatccttaactatacaaacagaactatatgattcaaagtcaacctaaatgttgtggaatcaaagccttacttatgaaatatcaaagagactacgggcagccagtgtggttcaaagtgaagaacagggcagcaggtgacataaatcaaaactacaaaatagactctggctcccactgcaccaaatgccactttgaccctaggaaaagcagtggccaatctactcagcagccaaacacaccaccaccatttcatcttactcaacgtacgtacgcatacacacgtgcacatgcacacaagcagcaaagtgacccagcacagagtgactcagcacatagacacagatgcacacacgcagacacacagagacaggcatacgcttggaaaagaggcacacacggacacatacagccatgtgcacaacaggggcatgctcggacacacatagatagaccccactgtatatgcacacacacagatgtaggcaggcatgaacaggaacacatacacacaaacacacactaaggcacaagcttaggggaatgtagacacacatatacacacacatactcagacaggcaaatacttaagacacacaaaaagatccacaccctgatatacacacatacaggtaaacacagacacagatcaatgtgtatacacagatagacacacacacacacactcagacacaaaaatatactcagagaaacacaatcagacacacacggaagaatccaaaagacaaggttaacaggttgaaccctgggtaataaaattcatatagttctcatttttgcctccatgctggttagcattttctacaatgagcatgtattaatcgtgtaaaagtatcaacgaaatcccactgggcctgtgagggtaggcgtgccctggaagcagagtgtaatttcctgatgagctctaaatgtgggctgggagatgagagggccaaagcccctgtcccaggccactggcttctttccgggcatatctcacccaaagatgaggcagcccctccactctgctccctgccaaagggttgggtcaggttctcacctcttgagggtccctcccctcaccgagaactccatgggtcacaattagaaagccaatcctggctgggcgcgctgactcacacctgtaatcccagcactttgggaggccgaggcaggtgaatcacctaaggtcaggagctcgagaccagcctggccaacatggtgaacgctgtctctactaaaaatacaaaaattagccacgtgtggtggtgcgcacctgtaatcccagctacctgggaggctgaggcggaagaatcattgcaatctgggaggtggaggttgcaatgagctgagatcgtgccactgcactccagcctgggcaacagagcaagactctgtctaaaaaaaaaaaaaaaaaagaagccaatcctaaatattaacttgatatccaagttaacagtaaccagaaaaccacggtcctcaaaccacagattggtattttgctgtaatcgtcaagttttaataatgtccctctacttcctgggttttaaaattcacatcttcggatattaatattcctgcattaacaacccccaaattcagaatttcatctttaactgcttgcttaaatggaatcaattcgttaccaattgtcttcaaatatgcagggtgatctaagtaaatgccgaaagataagaaatacacttagcctgaataagtgtatttcttacactgatgtaagaaatgtaaaatactgaccatatacaatggcaggaaacggagcccctgtcactcgctgccccggcccagggctcctgggtacagcttctgtctgtctgggaggcgactgccttgtgccaagaaggcaccctcgttaaggcatggaaacttgatggacaggcatccctcagctcaggccacccagcccctgccaacaatcccccaacagaccatctctccttcatggtcagtctcctgctctcaggaaaacctgccctaacgtctacctccttagatgttttcagagatctaccatgtctgactttgctcccagccttcaggagccaagtgttccagggagcctatcttgccatccgcaggaagaagtctcaagtctcttgctgcagggttcccctccccatctcagcccccactagcccccaaaccaaccccccatcatgcccccgccaggacctggcaatgagcacccgaccccatgcccacacccacccctcctgccagagcccgcagcaaagcctgctcttcccaaatcttccttgggactgctccaatcaagccacacacggaactgctgcctgggccggaccccaaactcacaagcccctacagaccatcccggcctacacccttcacgctactgtcatcacaccgagccacatcactgggtgagcccaggggcctcagtccacagggtctctctggccgtgtgcatgcccaccaccctcagcccacctctgccctgtcccctctgctccttgtcctctgctgtccccacacctcgagaccccacacactcttactgcaggcagcaggcggcctggccctgatctggggaggtggagggaggtctgagaccaaggctgagcccaaatgggacagaccccaggccaggcaccccgagtagccacacctggaggggtcctggcccaaccatccagctggaccagggtcccaagggtataggctgggtggacaggtggggaccactgtctaccacaagctcctcttccctgcaggccaggggataaggggagctgggggggcccatcaggtcaaaccaagaggccaaacctgaacttctgttagaggaggaggtcaatcgaagcccaaggtgcaaggtgctgcagagacatttaaaagggtcaaaaaggacaatgccgggaacaagcagcttcatcagagcagtgagaggcaactggggcggaagcagctgcgtattggagaggaggacgacagcaagattcatcttgcttgggaaacaggctattaatatcccagctagcagctggaggtgcacccggcaggcaggggaatgcggttgctgagcggcagcggctcttggggacgtggtctctgcccagcccggcacaaaagtgctggcagcctgggtgagtggaaggcagggggatgagctgcacctggaccccaggaatgcagacaagactgtccacagggaagcggctgggagcagctggaggcaaaggctggggccccatgtcaaggcccacggcatgcagggtagggggcaccagccagagctcctgcctcagtgaaacagccctggtggcagtgaggtggaaggccccgaggggagagacatgggtggatggccccctgcaggggacaaggaagggagggaggagaacaagcaggccagagatggccacgagggttctcacccgctgcgcattgcaacagccaagtcagagactcggccagcagcccaaggcgtaggtgcggaaactgacgcaccagcacccggggtggggggcagtgtctcagcccagcccccagctgaggggccgggtgagcaccccccagtcagccccagcctggcctggatcagagattggagaggtaccagcccggtgcctggggagatggtgcaaaagtaaggcagtccctggctctccaaaaagtgtcccagtggtgacagggtggggtggggagtttgcagagcacaggctcctctgggctcttggcagaggccacagggactggggggcaacaggtgacagagactgggatgagaggtcacacctaggaatcctcctggggggtagaacgagacctttgcttcctgacactcactgacagtgatgagggccctggggaagcccagggccccacctgccttcctcggggaacctcaaggagcagctggcagagctctgcttcagaggccacatcttgagctcctggctgggaaccacacccaccacacagctgccagacgtggtccaggggggctcagcattctctctagaggaggagcaagcaaagctctcaccgctgagaaggccctcgactcactgacatctgggaaactgggaattggtgatcctggagcccacctggcccaccacgcagatggggagactgaggcacagaggagcaatgggatttgctggggtttgcatgcgggcaactgtcactgagcaccagctctgtgccaggctccaggtgagcatgatctcctccagtgcccaccacaagcccaggcagcaccaggttacacgtggaggagctgagggtccccctgctgcagagacccaaacagaggccatagagaggttccatggcatggtcgaggaaaggtgtgcaggacactggagacccagcaccaggtagtgctggggggattcagggagtcccgggactgggacaggcagcagctggctgtgcccgtagcccctctgagggcctgggggcctggggagagagagcagctccatggccagcatttcaacaagctgggctaattgctgccaggcgtgggaggcggggccgctttggggaaactcccaggaggacacgaagatctgtgcagtgaaaaagcaaacctactacccgcccctccacccgccccactgctcttagcatagggggaggtgggaggtgatacatattcatgagctcataatccctcatcacccctacatcacacacagagattccagcagcttgggctcatacataattataaggcggttcctccatcactgccttggtccaccagaggacaacagaagacatgggggctgtaggggatgcatgataggggaggggctggggatccaggtcccaaagttggggctgggagctgcccactgtccacgtgcagcagcctcgagcgcaggggccttgtctgctatggcatcagccagcaatgcaggccacagacccccagggccagtcaccagccagtccagggacccaagcacatccagtgggcagggctctcccgccctctccaggctctcccgggggctgtgggtgaggggtgacaagcaggggaggggcgtctttccctgtgcccaaggtctgtcctcctgcctggagagaaaaggggaaccgcttcccaagcagggtttggaggctcagcctggcgcttggttaagagtgagaagaggttaaagggatcctgcctgggattaggacagcaggggacacaggggagctgctgagagccgggttggaaggggttaatggctgggactaagagagggggcttgggacaggcacggtgtctcacatctgtaatcccagcagtgtgggaagctgaggtgggtggatgacctgaggtcacgagttcgagacaagcctggccaacatggcaaaaccccatctctactgaaaatacaaaaattagccgggtgtagtggcgggtgcctgtaatcccagctactcaggaggctgaggcaggagaatcacttgaatccgggagatggaggttgcagtgagccaagatcgggccattgcactccagcctgggtgacagagcaagactccatctcaaaaaaaataaaaaaataaaagaaagggggtggtggcttgatgcacagaccacaggggctcacagcagatgtttagagggaaaacaacccacctgtgcctgcccctgcccttgcccctgcccctgccctggccagggctgcctgagcactttccttatggagcaaacagacacggggcacctttccttcaagaaaaatcaaggtgatttttggcaaattatgcttctaaacatttcctcaaaatgcccaaactccttaaaaagaagtttgcatagttcatgtcttatttgtagaccgggaaagacctgctagtgaaggtgggagtgggggatggtggggaaagagtccctgggggcccaggactcacttgctgatgccgtcaaaggaggcctccctgcagacactgccgctgtccgtgttgacgccacgctggggagagagaacacagacatgacacacggggccgcatggcgcccccacagcctgcacccctgaggcctccagctaggctcaggacaggtaagaacaggatcccctcctgccttcccccaacagatgagccacccagccaggtagctccaggcccggccccaacacaaggacagacctctttgctaccacttgccaagtggaggaagtgggggccccccaaactctgcagcatcccagctgcacagcaaggccttctccatggaggtcagagcactctgctgaaaccagccaggctgcccaggcacaggcgaggacccgggaccactcccaatataaatctgctctccccagcctggtccatcttccctctcctgcacacactccccactaactgtataacatccgaaagagtcctgtcgaacccagcccttctggggaggtgtgcaggacctgactgtggcaggactgctgtgaagcagggagacatccctctcttaactccaaggagactccaaatgggacttggacaggaatggagacaaaacaagggacttggagaaaaatgggccctctccagaaaggcaaggcattttatttcatttattttacttatttttttttgagacagtgtcttgctctgtcacccaggctggagtgtggtggcaccatctcggctcacctcagcctccacctcccaagttcaagtgattctcctgcttcagcctctcgagtagctgggattacaggtgcgcaccaccatgcccagctaattttatatttttagtagagacatggttttgccacgttggccaggcttgtctcgaactcttgacctcaagtgatccgcgtacctcggccttccaaagtgctgggattacaggcatgagccactatgcccagcctgggcaaggcattttaaatcaccatttctttacccagaacttcagcttgatgtctaattgtatatctaaattgaacacattggatcatctatgaccataatcatctcacataagtttcccttatagccatcaagacagtaaagcaaaaaaaaggggccaagtgctaaaggaaataactattttggtaaaaatcaattaagaaaagagaaaggctgggcacggtggctcacgcctgtaatcccagcactttgggaggccgaggtgggcagatcacctgaggttgggagtttgagactgatcaacatggcgaaaccccgtctctaacaaaaaacacaatattagctgggtgtggtggtgcatgcctgtaatcccagctactcaggaggctgaggcaggagaattgcttgaacccgggaggtggaggctgcggtgagccaagatcgctccactgcactctagccgggcaacaagagcaaaactccatgtttgaaatgtttgttcttcagtgccataaagaaatagcacttgaacataaatttaatttatttagtaaggccattttcacttcctgcagaaagggtacactctccagcagttttgccacgagagttcaccaaacaaaggagacagggtcgtttataacctggcgtgtccaccctactgctgtgtccggtttccactgcctggaacgggaccccacattctgtatttgtcccgattggctagcaacttagaactttttaaaagaggcaaaggtagagggggagaaaggaaggaggaagtaacttgtggaatgctgagaaaggtaaaaacacttttaaataaggaagaggaacaggctatgaccttatgtttgcttggaccagtataagcacatcagggcaaatatttaggttaaattgtgggagctaaaaacataaagtatattgatttctttattacagctagcagatatttaagaatgttagcacaggtctttgaataaattttgcttctaagagaagttactgtttatttctaattagacggggaggaaagtctttgaagagaaacctctactttactttttatattccatttcaaaaaaaaaaaaaaaaaaagacaagagggaagggtcactttggggggaaggcttgtggacatgcctcttatatgaaactcccaagctcaaagaagtgtaagaaagcacacttctctgagaaattccagagaattctttgggggcacaccacagctcaagtgcccccaaaaccctgccggcgtacccagagcccacctcgcaccccccaccctagcccaggccctcggtcagtcactgcgccccacacccctgctaccttgagggcagacgcccggtggtgtggttttcagacccctttaacaggggagacagagggtgggaataaactttcttttttcctttttaaattttttatttttagttttcatgggtagatattaggtgtatacatttatggggtacctgaaatattctgatacaggtatgcaatgtggaataatcacatcaggatacatgagctatccatcacctcaagcatttatcctttctgttacaatccaattgcactcttctggttatttttaaatgtacaataaattattgttgactgtagtcaccctgttgtgctatcaaataccagatctgatttgttctacctagctatattttggtacccattaaactgactttctacatccacaaattccaggagctcagcctgacacaaatacatcttctagccaggtttaaccttaggagtgggtgtggcgccaggcccacatcctcacgacaggacacagcaggtcccagggagactcaaggatggggtcccataaacagctattcagactgagcaggtatcgctacttatcactgatgaccattcctcttggtttatttttttctttttttgagacagggtcctgtctgtggcccagactggagcacagtggcgcgatcatacctcactgcagcctcaaactcctgggctcaagcacgcctcccacctcagcctcccaagtagctgggaccacaagcacatgccaccaggcctggctaactttttaatttgttgtaaagacagggtcttgccatgttgcccaggctggcctggaactcctggctccaagcgatcctcccaccttgcctctcaaggcacttggataacaggcgtgagcccctggacccaacccctctccgttttttaatcctcccctatgggcccgacctctgcaggagaggtggcccccataaaaaccctccccagagccaagcactgccccacccctggacaccagccacttaccaaagtgaggaggacagagggcttctgtgacgtcaggacgctggcaatctagaaggtcggaaagaaaaacccactttagaggcaccactaagcctaatgaagatgacatgccaccattccttcataatgacagtgcacatttatcaagcagatcattagaacaggcgacgtgggcgctgccctcaccctgcaggtgaagaaacccagcttcccctggttgaaggacttctgaaagccacacagccatcgaggggcagagaggataaacctacacctggctcgcttcccaccgcaccgccctgcttccaggcaccacacagatccctggctccaagcagccagccctacccaccctccaaggccagcccctctgcccatctgcaaagtccctgctcaaagacccgtcccccgggaaccctttaggctccaggcctaccagcctctggttcctagggcagaagactccctccctgctccccattcaacccctagacccaagggagttggccttccccaatcccaccctctggcccccaccccacagcccactctctgtccctccaccatgacccacttggacctcctgccactgcaagccagttacttcccggcccaagcccttgcatctgcatgccgggccagctcctctctccacgcctctgctccagctcttatctctccctgagtgccttcttcccatcttagtgcctcatcaatgtgcactcaggatgaaagccccagccccctgggcaggttcgttcactccctcctctactgccccactgacagtcaccattcccccagcaaagtgccatgtgccaaccagcctgctgggagcaatttcttcctctgccagcccctcctcctcagtctggcctgcatcttggctactgcagaccctcttgtttctgagcaccccctgggcagagaacagtctcatctccacagccctcgcctctccccacacccctatcctaactctttacacccgaaacgcagggggagagtgaggagaacttgttgttgttttaacagcttgattgagtgatcactgacatactctatgctgcctgtatttaacatagacattttgataagttttgacatatgtatacatataccttttttaatactgagatgcctcccaagaaaacctggaacgtattgaaaactataaaaagataaaatgcacgtacaatcctatctccagagacattttagctttgctcataaaaacagagatctgtaatgacatttggatcatatgaaattacatgcttcacttatttcctgtcattatatgttcttcaaacatgcaatttttagcagtcactaccgctggggacagtaaacgtccagtaggtcgctgaagacggcctgtgccagtcatcttacacacagcatctcatttaaccacacggggagacagtgcggcaaacatgcaggtttcgcaaatgagaatggcttacagattagagaacttgcctgagtctggttaaaaaataacagcgcagcccagatttgaacctatggctgtagaatactctcttaatggacactactcattcctctacggacacttaaattacatctaatacactttgggaggacagggcaggcagatcacgaggtcaggagatcgagaccatcctggctaaaacagtgaaaccccatctctattaaaaatacaaaaaaaattagctggatgtggtggcgggtgcctgtagtcccagctactcaggaggctgaggcaggagaatggcatgaacccaggaggcggagcttgcagtgagccaagactgcgccactgcactccagcctgggcaacagagcaagactccgtctcaaaaaaaaaattacatctaataattagcaattataaataacgctgtgatgaacatcctcgcatacaagtatttccttaaaattaaatgccagccagccacagtggatcatgcttgtaatcgcagcacttttggaagctgaggcaggtggatcgcgaggtcaggagttcgagaccagcctggccaaatggtgaaacccccatctctactaaaaattagccgggtgtggtggcacgtgcctgtagtcccagctactcaggaggctgaggcagaagaatcgcttgaacccaggaggcggcagctgcagtgagccgagatcatgccattgcactccagcctgttgggtgacagagcgagactctgtctcaaaaaaaaaaaaaaaaattaaatgcctttaaaactgttgggtcaaaagccacagactttgtcaaggtttaccatgctcctggcccaatgatcctccagacatgtatcaacaatctcccgggatcctccctcatgttactgagtgactgcttggagaatggctgtgtcctttggcctcagtgttgcaaaaaaacaaaaggctcagctgggtgtggtggctcatgcctgtaatcccagcactttgggaaggctgaggcgggtggatcacttgaggtcaggagttcaagaccagcctggccaacatgatgaaaccccgtctctattaaaaatacaaaaaaattagccgggcttggtgactgtaatcccagctactcgggaggctgaggtaggagaaccgcttgaacctgggaggcagaggtttcagtgagtcgtgactgcgccactgcaccccagcctggggggcaagaatgcaactcagtatcaaaaacaaaaaacaaaaaaaaacacccaaaaggttcagctgtgtccctacacaccctcagcccctcctgaaggaaggggagacttattaaaaggaacaggggtacacatgccggccctaggtgtgttgttacgttgatgtgaatgttctgcattcagctgcacagaaggagcccgtcaattacagcagctgaatcagaaagccaggaggcacttggggattgtatctgctatcgtcttgggagggaggagcaggataacaaatgtgtgggctgatggtttttctccgggcgacgactctcaggacatgctggttaggaataatggaggaggggagagcagccgtctccttgcagcccggtgctcagacaatccaggcctgactctgagagcaggctgtgcatctcctagtcctggcagggcaacatcttttattgatcacaactgcttgagtgggccctggttacttctgcggctgcaaaaacctctcccgacctggcagctccacccgcccttccccatggagacccattagtgctacgctctcatcagcacaccctgactccgtgcctcaaatattaagggaacacgacgcgctgtgcgttgctggctcccgatgtatccccagcacacaagacagcacggctctgtcaactcagggcctcgtttccacggagtggtggccactggggacctctcacaccctgcgctgttaaatgaccctgccttgcttcatgccagagccagcatcgatttctccggcagcccccggcctctctggcagatggagctggatggtcacgggcagaattcatcagagccctgtgggtgtacatcctcccctggggacaatcagaggcttcccacggacacctcctgcactttcctaaccagggcccagaccaggcccgagggccgcttttcgcagggtgataagctggacaaaaaagctggatatgcctttgccagcgctgggaaagcctgcaaggctccagagagctggctctgccctgcaatcactgaagcttttgaaaataaaccttctttcgtggcattctcctccaacagtattgcacgctggtggcctgcactgcttttacaatttcaaatttgtttctcaaatgtaaacatcaggaaacatcaccaacagtctggatgtgtggctactcctgaacaatcaggttcctggagccatgggctcgtggtcccacagcacagtggcccctgctgaccccatcgcttccgatgcctgtccctgtgctgctgcggttgtcctcttacatctgtcctgcctgtagcagacttggtgaccctcggaccttctcacatatgcctggcgccataaagggaagcaagtgcatggaacgcacgcttcacctgccagctctcagccggtgatcccgccagcctttgcacagggccttcacggcagagcctcggggccccactcaaggttctgctgaatgcctccttctcaggggaactgccttctcaataaactcaggatcctctgtggggaggagggaacctcggagccagctgtgccccatcagacacctgcatggcatacatgctatcacgtgaccagccatggcactggaggccttcctgccttttttcagaggagacaagcgttggctgtgatttgtcactgacagctaaggccaccccaagtgagatggggctgagcactgcagaaccagcctggggaccccttccctgcataaagggcttcctgtaacctcccatgatgcaacaggccctgggtacctcaagcaacctgggatacctcccagctcagggggttcagtccagcaagtcacactttttggcaggctcccttcagagccacagaaaatcaaaggcacagggagtccatgtcgcctccacaggagtgtcctacagcagccctcctttctgaggggaaagggaggcctggaggggaggcccctggcgtcacatcccagtaccactcccctccagctgtgggactgtggacgaggcctttctctctgagcctcagcctcatatctatgaacggggtgggggctacggcccagcacagtccctgccccgctgtgtccctcccgcagcgggagggccaaggggctccaagagagctctagtgttactggagcccacgtgggccgccccagcatgaagcgcttgctctgctgtcaacgtgagccttgttcccagtaaaaacagcagcagtaacagtaacatcaacaccaatctgcaatggcagtggcgttgacggggtgcggtggggtgctcccgaaccctaaagagattctagcctttgaactctactgaagcctcgacaatctgctttgtatacgaagacgaagaatgagccggtctctgtgctgtcattctgtgcaaccattaacaacttccctgccctaacactcaaggtggcctgtctcttactttgcttagagaccagttctccttcctcacccccagaaatcacagtagacacggagctgaattttcccccagttataaagacaaaaatgtcagacagtggctggggaggctgtggtccagaggtggctcggactcagcagctgagtccagggcagaggcaggtgccggtcccaccacggtccttgagacagggtcctggaggcaggtgcccatcctgccagggtccttgagacagagtcctggaggcaggtgcccattccaccaggatccttgagacagggtcctggagacaggtgcccatcccgccacagtccttgagacagggtcctggaggcaggtgcccatcccaccagggtcctcgagacagggtcctggaggcaggtgcccatgccgccagagtccttgagacaggatcctggagtcaggtgcccgttccaccaggatccctgagacagggtcctggaggcaggtgcccatcccgccagggtccttgagacagggcccaccccaggctgcccctccaggtttcacatcgaagagacctgaagggtcaaggtttcaaaggacaacagtgttaagaaacagtttctggggcagggaacacatctgccaaggagagggtcggaaggaaaacgagaatgaaggagtaggtgcctcctgctccacttctgagacatacaaggcaagtggcagatggtctcattgggagcatgcaaataaacgttccgtctattttagatcctgtactcaacgggatcaatatgataggtcacatgtgtattgacagaatcttcagatgttaagagtcacccccaaaagcttgggattgaaataacataacataaagatccatcaaaagcctcctctctccacagtccaaccaggcagaagatgctgtagagacaggcccccgtggccctgtagaggtgggcagtgcccttcacagaggctcttccagggatctctgcccaggcaccaccaccctgcggtgactgttcactcatgtggtcacctcctgcactggactgtgccctgggctgttgaggtcagccctgggtctcggccacctctgatgccctacatgtccctgggactgggcagggaaagagtgcaagaggaacgtctggggaaaaagaactggacgttcaagacaaatacaagacagtcaagggcagggtgcacatcagaacacagtcagcgtccatggtgtccacaacttggtcctgagggctcagggaaggggcaccagtgtgggccagagtctacagcagatacagtggctgctacaaggctggtgcaaggcctcaaaagatggataggagaaagacagagaaatggaaaacatattccaggacagcagtaccgggggcagggctgggcacatggtactggcccacctgcagtcaaagagggctggccacccccgagctggatgggccgggctgggcccccacatgctgggcagagacaactggtctctcacagcactgtgtctggccatgatccctgggaacctgcttctcacccagtgccgtcatcttcaaccaggctgtgtcctgcccaggggaagggggaagctgcttggccgccagaactggctcccctggccacttccacactgcagccccggctcttagcatggccgacacataatctctgtctggggaaatgtggctacaggatggccctgtccaaagctgatgctgccaggtccaggttggactcccagtggcaggcattgacttctgggtgcttcacattctacacggcactgacctgcacaggacgtggggttgtgacagcgcccagggccagagcacagaggcctcctgtgtgccaggcagtggtttagtgtcagggcctttggtcaagtagaccacaggggctcccagctgtgctctcgcctctgtcccagccctgccccactggcaggaaggagagctggagtcgaggagtcagggcagcccctttgacctgcctgaacttggttggcacagattcaaaaccccaagaggacagccacatgcctacccaggccacacgacacctgctggacaaccccactgagaagtggattgaagtcaggggacctccaatgctactctacaagcctttcacagcctcgggcttttctgacagtggcatctgcagtcaaccagggctcgagacacacgaagaccccggcccagccttgtggtgacttagaccgtgtgccaccgctgcaggcaggcccgcctctcagagacacctcatgtaatctcagcggccacaacccaggtcaccagacacttctacccacagagtcaggggccttcccaggcaaagcaatggctccgtagagaagcctgaggcatgggttgctgcctactccttccaaatgggagcacctgcggcgcagggactggtggccaggtggtagtgtccctgacatccagcaaggttgtggcagtggaaggagaggaactccaggagtggaaggcatgctggaagccctgggctgctcagaggaggagccggctacccacctcatctacgtactggacgtcgtccacggcatacttctccttgaagtgctccttggaatggatcctcaaagaaaagcacaaggaatatcagggtcagggcttggtaatggctcagcatggccaccttcctgcctgccaagcccaggccatggagccccagtcccatccctatcacggtcagcacccagcacccagcacccggcaccgaacaggtcggcccaacacacacttggagggcaaaggccattaggccatggagtgacggctgaaccacagctgctttcctcagcaagccccgctcctccgtgaccctagccacctgcagccagcccctgcagacaaaacccctatcatcccctccactgccagagacagtccaccagggcagccagccagtgcacccgtccctctgtggcataaaacaatctgcctgccaggtcttcatggagcatctttaaaggaaagtttattttaaggtcagccgcagaatcccagcactttgggaggccaaggcagacagatcacaaggtcaggagatccagaccatcctggctaacacggtgaaaccccatctctactaaaaatacaaaaaattagggcgcggtggcgggtgcctgtactcccacctactcgggaggctgaggcaggagagtcacttgaacccaggaggcggaggttgcagggagtcaagatggtgccactgcactccagcctgagtgacagagcgagactccatctcaaataataataattattattattactattttattttatgttctagagacagcatctcgttctgtcacccaggctggagtgctgtggcacaatcatagctcactgcagcctcaaactcctggtctcaagcaatcttcctgcctcagcctcccgaagtgctgggattataggcattaggcactgtgcccagccaaaaattagcatttttagaaagtcagtatcagtattactcaatgtgatgagaaaaactcaagcttattcattacccctgaaaaatctgccagtgagaagacacagaatggatgaggttgggcagccctcgtccacctcctgatgggccctttggtcacagctgtgctaggcagacctccagcctgggtccagcaagccaccacccccaggctcttggtcaggagataagtcaatgtctctgttagtgacagagcttacgcaaggggaaaggaacacaaactgcacaggggagacactgagagccaagtccaatgacgcacacatactcggtcctatgtcatcccacacctgggccccacctcatcacacgggctctatccccagccgtgctccagccctccagctgtctgtgacctcacagtgttacagtcaccaggtgctgggtcccaaataggcctcagacaaaaaaacagcagatggtttctggatggtgtttcctgggctgtcaaggggtggtggtgaggcaggagaatagggtcgggaggcgttagggctttttcatgctgacttcctagaactaaattgaaaggaaaaccctaactttccacacctaagtaacaaaggaccagaggctgctccctttgcaaacccccccttttttttgaggcagatgggaaattgaaagtacctctgattgcaagtagagtcttggtttgcaaagaaacgcaactttgtaacttcactttagcctctgattggttgcagaagtgaagttacaaaggttgctttccacaaccaatcagactgatggcaggccaccacttcatttacaccaggcgagcaccaagtggccaatgggaaacctcctgggggtatctggacctgagaagattctgtcactaggccttgagactctgctcagccggctcccacactgtggagtgcactttcattttcaataaatctctgctttcattctttcgttgcttcattctttcctttgtgtgttttgtccaattctttgttcaaaatggcaacaacctggacaacttgcagtcaagaccctctacggataactggggggcgggggggggtgttgtgggtgccaaggataatgtgcctggagaaccccacggaacacggtggagggagagaaccttgggacttggaggtgatgaacttcacgagtgagctcctgaactggtgtcctatgtgccattctcagcctttgtgacactaaggaccagcatcacctgcaggaaacagaatctgctcctctctctgagtcctccaccacttccctccccacccaaaccaggaagtactggccacagggcccagggacggctgcagggagcaacaacaaggagcactgagggcccgggagacgctggtctcaccgtaatcaatggactgctcagtgcagcccacaatgccctttgctttctctcccttttggcttctctgaaatgatcacggggtatcaagctcctgctgttaattaaatttgcatgattcagtcacattcacttgtgcatttgagacaggactcaaaagttaaatggccaaggtctgacacctccattagcacggcctcgagcagttatggggcacgaattgatgacgagcgcctcgcctggacttcggaggccccagacgcagggcttattgtgcagctggctcaagggaagcctacagaccctttgctactgagcaaccacactctcagcaccgagttgaccccacagcccggcacaaaagcaggtgtcagaaatacaaaaggcagggccatcagcgaaatgcgtggctgggatcaacacatcaactcggactttctggctccataacaaacaccctgcgtccctcagttgttcccagctctgcctctagccccctcccttcattgcctccagctgtgacaggagtggaaggcaacctcacggcagagtggggaagtacaaaggatctgattttgaggccagcgccctacagaggggcatctcagccatcagtgtggcacctgaccttgtcacttccactcccgttatgggcctgaaacctcccaactcaccccaactgtgcggagggaagccaccaggaaatgcattcccgcccctcctgccaaaaagcgcctcccaagccagaggtctggttctcaacagaagagccattcgacagatacaacctgaaaagctgcaagcagcttttctggcaactgtgcattgcattctcttttaaagggcagagataattaagtttagatagtacttatttttcatgtttgggggctaattatagtaaaaaccatttaaacgtcatcctaagggatatgcgtgccagactcccacgtcaaaccagccaccgaaggcttggcagccatgatttggtggggttgatgagaaaagaagaggtgtggccacacaagccctgcaaagctggctggagaggcccctgaggggctctggactccctgaggccaggctggccagggcaggaggcagccactcagagggagggcctgcaccctgccctgtggggagtctggggtccagcaacggtacttcatgtcaggccccatcgcatgggaagtctggatggaaacaaccagactggaggccgggcaccgtggctcacgcctgtaatcccagcactttggaaggccaaggtgggcagatcacctgaggtcaggagttcaagaccagcctggccaacatggtaaaaccctatctctactaaaaatacaaaaaaattagctgggtgtggtggctgtaatcccagctactcaggaggctgaggcaagagaatcgcttgagctagggaggtggaggttgcagtgagccgagatcgtgccattgtactccagcctgggtgatgagatcaaaactctgtctcaaaaaaaaaaaagaaaaagaaattactggactggggaggatgggtcagcagagaagctgctgtcaccccacacacactcccctcaaatgccaaggatagctttgggaggagagaggagaagtcctcctacccaaaggggctctcgtcctccacaggggtcagcatccagggaccccagttgggccctggcatggatgagagaggcctttcccagtccccggagtcaaagcccatgactgcacactctgcagtgactgccagcaactgtgggggccacgggtgggaaggagacattaaattaatgccacacagtgcagacacgaggagccctctagaaaatgaaatttcaaaaagcaggtcttgctggctggctgaccacctgcatgcgattaatgaataagtaacagggccaaattacagccatcaccatccatttcccgcggcccggcctgccttcagctacaaacaatgctgcctcgccgactctcactctgctctccacagaaggcagcggcatttgctctgcggtggaagccggcagccatctgaggatgttagctggtcagagacaaaagcagacctcgccacagtgacgcaggtgcctatgcccaaagaccactcccggagcaagcttcctcacaggggccacagagggaacagcgctgcccgggaggctggagaccaggtccagtgaccaggcctgcccagggtcagtgcctcaaaccacccgggcagcagccgaaggagctcctcagccccttctcagaggcctgcacggcaaagagggcccccgacaccctgccaatcacaaggagcgtgggagggaggcaccagagaggctggggaagcctcgatcctggggacacttagtggggcagagctgggaaaaacacacaacacacaacacacaacacaccctcatcacaaacaccctacacaacacacacacctgcacacaacacggcacactcacacccaccacaccccatcacaaacaccctacacattatttactcacacacccacacacccacatacaccctcatcacaaacaccctacacactacacacacccacacacaacacagcatactcacacccaccacaccccatcacaaacaccctacacactacttacacacccacacataccctcatcacaaacaccctacacactacacacacacccaatacaccacactcacacccacaccccatcacaaacaccttacacatcactcacacaccctcatcataccctacacactacacacacaacacagcacactcccacccaccacacccccatcgcaaacaccttacacacccctcagacacccacacacaccctcattacaccctacacacacatccacacacaacacagcacattcacacccaccacaccctacacaacactcacacacccacacactctcatcacaaacaccctacacactacacacacacccacacacaagacagcacactcacacccactacaccccatcacaaaaaccctacacactactcacacacccactctcatcacaccctacacactacacacacacccacacacaacacaggacactcacacccaccacaccccatcacaaacaccttacacaccactcacacacacaccctcatcacaccctacacactacacacacccacacacaacacactcacacccaccacaccccatcacaaacaccctacacaacacacacccacacacacccatacacaccctcacatgcaccctacacaccacacacacagcacacacacacttccatcacaacctacacaccacacacactcccatcacaaacaccctacacaccacacatgcccactcacaacacagcacacacatgcccacacacactccctcacatgcaccctacacacctcacacacccacacacaacacagcacacacacactcccatcacaacctacataccacacaccacacacacacccatcacaaaaaacctacacaccacacacacaccccatcacaaacaccctacacaccacacacacaaaacacagcacacgcacacccacattcacccctcctcataaacaccctacacaccacacacccccatcacaaacaccctacacaccacaaacacagcacatgccccccccacacaacatactctacatgcatcacacacccccaacatatgtcctctccacatcacatccatacgtacccacccctccacatgcaccacaccacacacaggtgtgcactccatatgcacacacagccccccacacatacaccatgcatgtgcaaaccctcccaccatacccgcatccatctctcacacaagatgtgggtatggccctgggaaggctgagcgcccctccctgcatacccagagccggggacggaatgcgttacaaaggttccaggagggtcccccgacctggtcaaactggctccccaactctgggctccgaagctgcctggggcgctgactcacagaggcccacagccaaagccaccctccactaagcccaactccgatgaaaaatgatgggaaatgctctcacatcaaaaagacaccacacactattgttagcagagactctgaataaaaatgcattcagagctaccaccctccccatcccagaacaggcctggggtgaggagtgggccggcttcaggctgcccacggcccctggcgtctgcaaccctgacaacagcaagaccgtttccacaggaagcggcagatcctgcagacgggggtgtcgtttccctgggcgactttggattgcagtatctgccagatggattttcaaaaaccatcagatagggactcaaaaggaagctgaggagctgaaggtcaaatgtgaagtctggtgggttttgcttgcaaaggccaggtactcccgtcagcctcgctcctggtgccctattgattccaggagcggctggaagcagccatacgcaatcagatctggccactccccagctccagtcccacatagtcaaccccgccaccactgctctgttacaactgagccttctctcctgagggctcaggatgtggagactcagacagggtcactccaggacagtggaacggagaggcctgctcggggtggctgtggtagggagccaggacagcaggacacaaggctctacctctcagctatggggccagatgccccctcgggaccaaggctgcctgatctgacctgcccagcatgtacacagccttttccaacaggggagacccctgttggaaacccctggaaaccccaggtggggccctgtttagcccctgatcagaccctccctgaagctgtttctccttctctgtccatccccacatctcacagaggaggcatccgacctgactgctgagctacttctctgagcagtgggacatgtcaacaggctctgagccagcagtgagggccatgaggaggcgagagggcagccaggtcaaaactgcaggtgtcacccggagccaagggtaccctggcacaggggccctcgctcgtcctgagtcgtgccccttgcaagaaaggctgaggccacaactctgctctgggtagagaggggatgctgggagaatcctcctgcagaaagcagacctaaactcttcgtcactgctgtcccagttacaacggctggggaataaacgactccaacacttagtggagtgcaaaaccaccaatcatgttcatggactctgaaggtcgggaatttggaccgagccccgagaggacagcaaagctctgctccacatctaggacctcagcagatggaaggctgggcctcatgcacgctggcggctggtgctgctggcggctggggtccccctatggggagtctgcgcttcctcatgatgtggcggctgggttcccagggcaagtaccccatgggagagaaccaggtggaagccacagtgcagtttacagtctagcctcagacgtcacacagcaacactgccacatccgtcatgaggcccagacctgggacaggcagaagggaaatagatgtcacctgcagacagcgagtgtccagaaacactgctgtggccatttttggacaagacaatctgcctcctggaaccatccctgcctcatgtcagtgtcagagatacagtggccagcactgtaactccagtcctggggggcctccagagcagcatcacagagaaggaactggagccccaaacatgaccagacccacttgcaagccccacggcctctcagaagccacacttagccagcaggcaagctcagcctccaattgcagctccagcaagacctggctgcaggacctgcacaggtcacaccagcacgctgagccatctcctcttttgtaacagggcagtcataaggattccaccgggaatgggataaaggtcgacaataaagatcacgacaggatgggaaggcattgtcaggccagggcctccgaggggcagcccggcagaagccccaaaggcagttggcccgggtgtgtccactccgtgcccttcttcccaggggccgagccaggagaccacccccaggagaaacagtccccttttcttctgctgccaattgtgctccaggctgagtcctgcccagcaaagatcccagtcttgccaggctgggatcctgccaagtggcctaagagcagaatgattaccaacttgtaagcctgaacccctctccctgagacagcaggagcagcacacaccatggccaacgaaggcagaaacggagtctgcactgaagggagggtagcactggaagcaggggaagctccactgtggccccagtcctcagcagagagcccagtccctgtggcagccaggggccttgtcactcaaaccagccacagcctctgcagcccacctggtaatgagcattctggggcaccaggcagcaaaggctgcaatttatacattagcccagaataatcactctccaggcggagatgacacgcagtgaggcagccagcatttagcgggatcctctgatcacctcaaacctccctggttaagtacagtgtccgccctggcaccactgagcaggcagaacagctcctcggcggtggggagtacctggaacagcaggcaccatggagggtggaggagggtgcccagcagcccgagcctctgctctatctcacaggtgagccgggagggcaggacctgcgctgcgtccagaggaaggcagcaaataacacacccagcatatcagcgatgggcctcagagaggcggttccccgatccaaacccaacccaccaccctcaggcacgcacagggccatgccacacctgtcgatgccatgcaggagtgacggcctcgcagggccaaaccctcaggcattttcacagacggagaagctagaatttcaggattaacaaactgcacttctaaacaaacaaggcccccagttgacagggctctgatgagtggaggaacaccagggttcttggtctcgagttgaattagagaaaacgacatggacacacgtggagtggttttaaggagcggagagtttaataggcaagaaggaagggagaagacagaaggaagaagctcctccatatggagacagagggaggggggctccaaagccaaaagaggaggtccccaagtgcagtggacaccagccaagtatatatgcagaggctggaaggggcgatgtctgatttacatagggctcaggggattggtttgaccacgcatgttattcacatagcccactaaaaagctggctctcccaccctagtcttttaatatgcaaatgcagggagccatggatgttctacacatgtggggatatttggggatgttctacacatgtggggcggccatgttgccaggaacatgtgaggcaagggtaagaaggccttgggaattgccatgttgggtggacccagtttctaatggcctgcatttgcatatcaaaggttgccggcctggctctaggagctggggctttaccagaaaacttcccaaggaccccttttcctctctatctacctaaaacaatttctcaataactcctaccacacagtcatactccagctctaacatcccttcccagccaagggtgcagggctctggcgagaggcaggctgtgacagccctgaccgcatgcccttcctcctgcagctcttccctcctccccgtccccaggcccaacccagctctctcatcccacctcccctacccacccccagcccatggttggtagccatggtgccctggccaggctgctccttactttcccatccaggtggcatggctggcaggaagcctgggcacaaacagggtcgacttcccagtgtcaacatcgatgacaccatagcagcctggctcagtgacaccgaacgcccagtgaaagaaggactcctgtggcgggaacaagaactattgttagccagtggaacatgaggtgcaaggagggaccggtggctgcatcacagcaccctagagagccagctcagaccgacagcctcctgtaactgaccccagccccagacatcccttcccctcagcactcgactccccagctcatcctcccgtagtttggcagggggcagcctggcagctcctctaccctgctgggagccctccctgatgctgtgtcaggcatgtgcctgagtccacctgtatccccacccccgggcccacaacagggcgtccagcagcaccacacgtccagctcaaccctgcctctctgccacgtgcaggcaggcaagacgccccccggattctgacgcccaggccggatatctgcacagaaatggattcctccatttaagacttcttacttccctctcccacccccgggacggctgatgacttcagtgtttagggatgaatgctgcgctaaaaggacgtcataaaggtatggtggaggaggatctcttccaaaattagccttgcataccatcagaaagggagccaacagctgaatttaggaaatcggtttttaagccgcagagtatttaaacctggagaagcatcaagactagccagagaaaacttatttagacctccatgtttctcacagccatgggattgcaggcttgcagctgcgcgaacaatggagtggagagacgggacccttcaggcaggaggtgcttttagtaaagaaaaaacacagtctgcggtcgctcagcaatgggtctcagcccatctgtggcctgctggggcgacagggtccagctagggaagccacgccttcccatatcctctccacactcagctccccttcgcattcccatctctcctcttgccaggatgctgcatggacacattccctaggctctgcctgccccagagaggttctgaagttcctgctgtggtcaggctccagctctgggcatggcagcggggagaaaacagcactagatttagagttggaagacaaagttctaatcccagctccacctcttggcaagtcatttcccctctgagcctcagttttctcatctgcaaaatgggtataatgctaagatgtgtgaaagtgggcccagctcagagcctcacagtcttcctgggtgggtgtcctcatgttcctgtgcctggggactgagtgctgccagtgactctcagccatggccaccatggccaggctggtttcctgcagctgggccacccgctgccccacatcttcaagttctacatcttcaaggagcccctggaccacttcccaggcgaggaaacagaggctcagggagggccacaaggggcagcactggccaagctggggcctccaactcctgctcaggacagcagcaccatcacacacctgctcacttgtggccaagcggggaggctcacctggcggaagaggaccccggtgtcggtgcagtagcgctgagtctcctccccgccctgcaggaccacgatggagccggcctgcacagcagggttcttccgcagccgctcacacaggcgctgccggttcaaggcaaagagcgccagcggcaccttcagggtttcattccccagccaaaacgagggtctgcagaggcaagagcacacaccgccacacaggcctctgttagcatctccaagcatgcccacacctgaggtcggggtgaccggaggcccgagcctgccgtgggacccccatcagcacggggcaagctgcccaagctccacctacttatgacccagaaacagcccctcactgatccccctgaggaccacaggggcttgtctcccctccaccacccatgctgtcctgactccacccccctgctcctctgccccccaaccaactgcacagcaggccacagtgaccccacgctcccgaatctgcagcaggtccccagtcctcactggccacttggtgcccatgaccctgggggccactctctctgcggaaaccttctccaacagcagccggtccaggctccctaccaggcaggcccctggctcccggctcaacctccctgctagaggccagcttggcccaaccctggggcctcttccctaactggctccctccctcagctcagctgagcttacccagtccttcagctcaaaggaccatctgcatctgcagactgatgatgtccagctccagactcacagacccatcagccaccctcagcaggcagaagatgcacctgaaccaaagtcgctcctccccagcctcccccgacacaaagcacctgcacctggacagtcccaaaggccatcctggcctcctatctcatcccacctcctggccaccagcaaggtctaccctcattgcacatccccatccccagggccacctccccatgtcccgtctggacaactgcaggcaactctcaacggtgctcttggccgcaacttccccgtggcctggtctgcaccttctgccagaagggccctttcaaaatgccaatcccagcacacactccctgcccaaccccgtgccagctggcttctctgagtgcagacttcactccccagccacaagggatccagacccccagttcacccttggcttcctctactgtggcacgggcatcctcgctcttccctaaacccccagaacactccagcctttgccgctgcggcgccctgtggggaatgctcttcccaagggcatcccatgcccttttacccagcctctgcagaaatgcccctttcctacccaccccagcctctgcagaaatgcccctttcctacccaccccatcccccagctctcttcgtgtctctctagagcccccatcactcttcatttatttgtttgctggccctccaggtaacatgtaagctccctgagggcagggacagagcaggtgtcggtatctatggaatgaatgaaaaaacggatggtggtcccagcaagcaggctggaggccgggtgtggagagataatggggatgaggtggaggaggagtaagcaggggcagggtgtgcaggagggagcccctgcggctctccagccagggggcagtgggtgggcacggaggtcaaggaggcagggacatcccagagctggtgcgagcagagagctctgcctggggactgcagtgaagctgtggatgaaacctgccctcacagcacagcacggtgaagtggtctggggcacctcacactcacctcacatgggaccctcagaggccctgaccctcctgccagggtcacatgagcaggtcacacctcctgcacatcttggctccaatacgaccttttccggatggtcttccccggcctccctctttgaacctgcagctcttctccttgcccaatcccctactagtccctggcctgaggtttccccacttgccctccagatacacccccctgcactgtgcccagaggccaacctacccgacctcctcagcatgcacgctgcctcctgtctccaggcgcactgagccaacgacaggcacatgaggctggggtcaggaggagagggaggaagacagtggatccactcccctggctccctccctggggaccctggaactaaatggctgggggcacccctccatccagggccgctgctctgatgacagcgccctgccccacagcacagcccctgctgggtttctgaccaggttccccactcttctttccactgtcttcctccctctcctcctgcccctagcctcatgtgcctgccttcccttaacgttcgcacagctctgtgtatcgtcccctctctcaactctccttagtggccccctggagtaaactcctaacgtggggccaggtccctggctaacacaacacttagcacacagcaccttccaacctaaacgcagcgggtgctgcctggtgcttcctggtgttctccggcccgccgcctcgggtggaaacactgggagatggagctccaggttgcctcggtcactgccgtgccctcgcctggtgccttgcctgacacacagcaaacgctcaacacatatctgctgaatgacacacggggccacacacacagctgtgggatgagaagatgccacatcagccgcagcagggcaggaagcagccctggagtcccagcctgcccaggaagggtggagggtcagaagcagccgcacatgctgacatgactagagccccgcccgctcccccacgtgcccttcctaccctcccaggagggtgagcaggtggctgggtggacaccagcggccagagcttcctctgggctggggctgcttttctgccacgctcagccattgggatgaaagggcagagggaagtcggtgagagttcgtaaacatgaccacatcccagatggccatgctgtcaggagctaaaagtgcagtcaccagcaccttgtgctcggatatcccccatggcctcccacgccctttcccttcactcaggaaagcccatggtgggatgggcacagaggcaaaactcgtctctgcagaatccccaacagcttaggggcaatgacaccgagaccctgctatggacagcctcagccacagtcgtcgaatagcatgaccggccgaaaatgcccatcctcagccaccagcctgcatagcccagcccagcccacctctcccacactcccctctccctgcctggccacactccttaatcataacaggtgctggctccccatggcctgacaccatgcccccacctgtaatgctcacagaagggctggccttccccttgttcagaaccttctgagagacaaatttctcagggcacccagactgggatcccaagggctgagcagaaaacttgataagccaccttctccttgaacactcagctgccactgcaaagaaaatctacaaccatgcttatttctccatggggctccgccagaacagaacccaccctgtgcagggctctgagcataagaagggctagcctgagccacgaggcaaggcaatatgctacagtcattaattacaggacaccaagtaataaagttttatagagacatgccctttgatttcccatggcataaaccaagcccccagagagactgtcaggctcagagtcaacacagacgaattcttcctgcaaattcggcaaatgtagcaccaacaaaacatctctaacaggtttctgctgcagcttttgttaactggcacccagaatttaaaaggcaaaagccattatcatccccaggtcccagggtaaataagccatgctttgctgcagacagacaaggcacaagagctccagggcctcagagacccacagaacaagtctctgagccccagaggccaggacccccgctgccctggaaacaaccaagacccagtaagcagcccaggaccaagaacggagtgaccaagactgaggccagtcctcaaggagggtatgatgccactgcccccacaagccgtctctgtctccacacaacccacacccccgtatcagtactgggacaccctctcctcaacagccacgtgcagggctcttacctaaggcctagggacccccaaggattcatcctcaaattcaggggctccatctactagatgggaaaaagctgtacctttattttctctaacctccaattcgaatttacattttcttcagttattaacataagcaacaaactactcagtgtcagcaatgcatgttaatctgtcaccaacaaaaatcaaaggtattttaataccatgttattgctcttccagtatctcaaaatatcacttttgctccccacaacttcaaagttaaagtagttgggccaggcgcagtggctcatgcctatcatcccagcactgcgggaggcaggaattcgagaccagaatgggcaacatggcaaaacccccatctctaccgaaaacacaaaaattagtcaggaatggtggcttgtgcatgtggtcccagctacccgggaggctaaggcaggaggaacgcttgagcactggaggcggagactacagtgagctgagatcgcaacactacactccagcctgggggacagggcgagaccctgtctcaaatttatgtaacattttgatacctgtatttccatataattgggttttacttttgtaatattatgtacttatttcatacatttaaaaacattatgccagccaggtgtggtggctcatgcctataatcccaacattttaggaggccgacatgggcagatcacctgaggtcaggagttcgataccacctggccaacatggtgagcccctgtgtctactaaaaatacaaaaattagctgggcatagtggcacacacctataatcccagccactcgggaggctgaggcaggaaaatcacttgaatctgggaggcggaggttgcagtgagccaagatcaagccaccgcactccagcctgggtgaaagagcaagactccgtttcaaaaaaaacaaaaaacaaaaaacaaaaaaaaacctgatgccgagaatggtacgtaggtttcactgatgcccgtggggtctaccgcacagacaaggaaagatctctgcactagaatgtggagccactggccaggtgcggtggctcacgcctgtaataccagcacttggggaggctgaagtgggtgggtcacgaggtcaggagtttgagaccagcctggccaacataatgaaaccccatccctattaaaaatacaaaaaaattagccaggcatggtagtgggcacctgtaatcccagctactcgggaggctgaggcaggagaaccacttgaacccgggaggcggaggttgcagtgagccgagatcgcgccattgcactccagtgtgagactccctctcaaaaaaaaaaaaaaaatgaaatgtggagccacttctagacagggtcacaccgctaagttcccagtaggagaggccagccaaggaccagccacctcctcccctcagcctccagcgtggggccaggcaccagacagatgctcaggcagcccactgggcaccagaccgtaagcgccaggctggagagggttgccacggcggaacaggacctcgaggcaactggccagcaacctccaccttgcacctctgtctcctggggcggataggggtgccaagcatacacagaaaccaagagacagctgtgtggagtcaggacctggggaagagccagggaaggcacagggatactcagtggccagcctgcctcccataggcccacccgtccctagcccccagtcggcctgagtcttctgctcctggagcacaaggttcacattgtggggttgggctcttgacccagaatgtgaattctgcagaagactctccagaagaatgctgactccagtgtaacctacggctcaacaggggtacacgtccagggcagttcacctttgcctctttttggctctgcaacagctcctgggagccactcagttaaagaattaaggctatttcttcatcctacccctcggaattctgtccccattccccaccatgactccttccctcaatcactgggagtctcccaggaaagcaggatgggatgctggactaatttagagtaaatccccttttcattcatttcaccaagcaccaatcacagggcagccacagactggccctgcggatacaaaagaaccccaggggttctaaggatgctaggagaggcatgaagggaagcaactcctaacccacaatgggcagacgtgtaaaagtgtactgctggggagaaaactgagtgttctggagttctgagcactaaacctttacccgagggctgggaaaggcttctgggaaagggaaccatctgagctgggcctgcaaatacgtgaagaatcatatagaggacaagaacattccagggctagttgggtgagtgtgcaagggaagaagggaatggaaaaagccatgtgggagagcagatgcagacaggtctggctggagctgacagatttcaaattatcaatcctgtctgtggaaagctcaaagcattgcttaaggagacagcagcagtgccaccaagtgccatgggatagggacccctctccatgaggggatgggaggtgacctcagcgcactctgtctcaacctgaagcctacacccaggctagcaagagaaagtaggatcaaccctgaaacaccccacatcttaaaaagagagatgcattcagagtagattcttgagtttcaaattaaatctgagatgctagtttagggcttcccctactccccaaatcatatggggcacaccccagtcacctggaactctcatggaccccctctgtcccaggctctggtaggattctacagacaaccaaacccaactcccagtgagcccacggcaatggccgtgacttgctggcatcatgcctcgttatgcctgactctatgatctgttctgtgagtgtggctaggagctgagctttgcgggaaacacacttaatcattctgctctaaaggaagccactggggtcaacctcaggctcaaagtacatgggaaagccccataccagactgggatggctcttcccaaggagactgccaggctctggaagctcccacaccctctcaatagcagacctctctaagacctgccactctgttttgcctccctcacccaccctgtgtggtggcccagagaatcggttctgctagaaaagctctcattctggggccaggcgtggtggctcacacctgtaatcctagcactttgggaggcggaggcgggtggatcacctgaggtcaggagttcgagaccagtctggccaacatggtgaaaccccatctccactaaaaatacaaaaaattagctgagtgtggtggcacacgcctgtaattccagctactcaggaggctgaggcagaagactcgcttgaacctgggaggtggaggttgcagtgagccatcatgccattgcactccagactgggcaacaagagcaaaactacgtctcaaaaaaaaaaaaagaaagagaaaaagaaaagctctcattccaggatccagtcagttccagacttgctcccgtccagacatcagcttggttccttcaggagagcagcaggtctcaggccagcttggaatcctgaacccaaatgcaacccctggcactccctgtgagcaccgagccagcctaaccagagagacagcacacccacagctgggcaccagcctgctcagtctaccctttaaaagggtcacaggctggattcaaggatctgaccctgagttccttgacacccatctgagactttgtctgcactgttctctacctgaagggagtctcattgctgaaggactagcacaaaagtcacccaggaagtgaagccttcccacactttatctgagctcagagtccatgcccctcctttgcaaatggcaagaccacacggcaagcagatggatgacagagtcccatgtgtccatctgttccagtggcctgtgagtaccttaagggaagacccactgctattcctggaatatagcaggtgcccacaaaatatttgatttgtatgctctaagctccctcaaccttgggggccaacttagaacccactttctgttgccattttccctgtatcttaaaaagagagatgcattcagtccactagatcccccattctgacctcagtttccaacctggcatctggaatactgctccctcctacaccatgccccctctaccccactgtaccaccagacccacaccttctcccattgaactcacacatagctcaggggagcctaatctttaaaaaacagatcaagcagcttgtaacaaaacccttccagcccatcagggcaaagtctgaagccgccacctggaacaccacaccttccaaccagccccaggcatgcacccctgtccccagaacactctgaactctcaacctttgtcccttaccctgggctcagatgctccctatctgggagattccgcccaacgctctggtgaacccatctgtccacccttcctcccactacgaccactcagctttctttcatttagcccagtatggagcacctactgtgtgcaaggcaccgggctactgagaagcaggtaacatacctgcccttgcactctaaatgcagagaagataaagaacaagtacaaacaatgctctatatagtttatcaggtgatgatgagggcacaaaaagtgggatagatggttagagaaggattccctgagggggtgacatttggcccctgaaagaaatggggaagtgccctgctgggaaaagggaattccaagtccgtctcgaataccgcctcctccgggaagcgcccgggtccctggggtcctcgcaacgccgccctcctacccgggggtcttggcagcgaacatgcgtgtcgaccccagcccccaccgcagccgcacacggtggggccgccagacgcgggcaggtggggccggagccagccaggagggtggagaggagctgcggcccccgcgctgaccctgactcggagcgtgcagctcgccgaccggcgctgggactccgggccaacgggaagaggcgcctacccgcggcattcagcgaccccggctgacgctctcacccgcggtccggccgggacacccatgcccctctccacgccagcgggaaagagcgagggaggcgcagcactcacccggtggccgccgccatgttcgcccggcaccggcgtcacgtgaagtgcggcgtcagctgagcccctccgggtgccaatgcatggggcggggtaagggcggggcagggggcggggcatggagtccttgacccacctcctccagagccaaattccacgggacgggaaggggcggtacctggggaagggcggagccccgatggggcggggctcccggagattgggggcccaagagctcggccaggataaatgagcgggctgccggctgcagacagtaggtcgggttagcgggcagcatctgcagccttttcgtggtgggagggaggtcctgaagcagaggacatcttgattctggttcagtccccgatctggcgtaccagcccacccgggagaagaacacataggaataaagaaaccacgtgggaggagaggagggagactgacccaggctagggtcggggcagaggtggcgatttttgtttaagaagggaaagggcttgagcaaaggccgtggggcaactggaggactctaaatgtgcagcgtccaggagaatgtgcgcgagagaggggcagcctaagggaagcaagggccagaccctgcggggcctccactgtggggcctatgagttaagtctggtaggatcttttctaggtttcctgggctgcagaatggagaagctggaggaagggaagccagggaggagggcaggcgagaagtgggcacagccgagaagggtttaggagggagagtctgccagaaggcttactcctctgccccactgggcactggtactgggtgcagagtcctgcagagaaggtgtagggaccctgcagcagacgctgccctccctactgccaacagagtcagggcattacaagcacggcccaaatgcgttgcacatgtgagctcatagaaacctcaccacagccctatgaggtcgagactatctttaagtctattatacagatgaggaaactgaggccagagagtgctcacacagaggctgagctcatgaagccataccctgaggagtgacctcactgcccctgtgaaggaagggggccccacactgttgggggagggcgtccctggcgccaagggtgtacagatgtgtgtggtgtacagatgtgtgtggacaggtggatgggtggcccaggataggcgtgtggggctcctgaccccaccctgcagctgtcccacagctggaagtggcttctgatcaaaggttgtgggttgggggatgcttcttgtttctttatcgaaacaaggatgtgggtcaccatggccaggctggtgggagccaggggctatgactggagaagcagcttctgtttgtccccatgaagcagggaggagaataggccccttaaataggagcaagggagccagccataagcagggtagtgaagggcacgtggcacagttacctggaagcccagtaccatccctgctgtcctcatctgtcaggagagagctaatggggccacctcacagggctgctagagggttttacactcaaacctgcaggcacagccagagaccaaagctgccaggaggaatgtggcccctccagacagcccctcccacctcccggtcccagataaggaaaacgagagctaatggaagagggggggcctcatcccttctaccccttcccacaacacatggacaatttgcaggggtccctgacctccaggcaaggtccaagaggagctctctccaccctcttgccagtttccaggaagaagaacagaggtaaggattcacaccccactgcctggcctaggggcccctgagaacttctaacacccctagttaagcagtaggtccgccttcagcttaagaaactcaactccctagtaagtggcgctttaaaaaatacataataacaaagggtgagcagaatgagctttccatgcgccttcaaggaaggaaaacataccccccagctcattcattgcacctgcctcccaccatttcttttgacataaaatatgtcaaaattaagccagctgccagctctgagtgcttactaatatgaaaaagaagtcaatatcccaaacacaaaataatggaaggaaggcacccaccaactgagtggagctcccttgtttgtggacagtaatatggaggcactgcccatgacccctgcccacccaggtcccctgccctctcccctccccatcaggggctccggcagggctgcccctcacccctcacccctccccatcagaggctgtggcaggggctccagaagccgcccagaatatgggagaagaccatttagttacttatgcagggcagacccaggacgttgctggagccaggaggcaattgggggaagattgattttagagagtcgaagtgggagtgtgtaaatcagccaaggcagcgcgccaggcagcactctcatgcggcattgcctccgaggtcacaggcccttgtggccgaaacagtctcctctcgtcaagccctgcaggtggctggtagatgtctgcactcggtcagcctggtagcccggtagccagcatagcattattctccagaagggcccccccaactcccgtcaggccttgcaaaagaagcttcaccctgggaagacacctcttgtgtcccgggacactgtgtccagccaggtttccctcctccacccattccccacaatctagcccccactcttgcaactccgtggacgctgctgacagctggctgcctggagacggcaggcccagatgtggcggcctgctaggctctgactcatgagccacccttgggccatgaaggggaggtccccgggaagagccctgtccatcttctgctgtggattgagggcactggtctaccagaggctctgtgggactgcactggaggtagcctggatgctggttctgccctgcaccacccagttgttgcccacagtgccactccaggactggccatgctgtgagggccagggatccagaccctgcccttgcctagaggatctttggtctggggacagaggtagaggagccctccacactgtccctggggagtccaccatctgggagggcctcagaacggggcttcgagggttctgcttttggctaatggggagatcctgggggattctgagctgcaagctgccgatccaaacccctctctccagcaggagctcaggaggattagcagagagaactgaaaagagccaataagagccaataaagccactgcacggggccgccagcctcagatggtcaaagccctacacaagatggcatttgggtgttttgcgattgtttgcttttgctgagaatagaagactggatgcagaaagccagcaccaaataaacagaagaggaagaatagaggggactgtgggtgtgagataggggcagggtggcatatggcaacccagtgtcttcccaagtgggaaagcaaggagcgtgatgggtgtggaatgcccaggagaccgtctctctatcctggttctggcagatcccagccttgggcctttgcagggcctgcagaggtagccacagctctcccactccaaaggcctgtgtggcctgctccttcctccaggcctacaccccagctgtcaccaccatccatcaacccccctcctcacaggagcccccacatcacgttctactcctcctctcctttctcccccagcccagcccacctgggcatctatcttcctgtagaaaagaggcaggcagagctgaggggccttcccaaggaagcccccatcaccgcctcagatgaagtggtccctgctgaatgctttgctggggtctacgaggcaattcaagatgagaaatggaacggtggcttcggaaaagcaaatcattccaacagcacctgaaaacatcgaaggaaacaagctctttttgtgtgtgtggaaatggggaatatattgtttctcactgtttcgaagactgttttcccatcttgaaatcacaagctgttttcttccagagagacttataaatacatccaattatcgacattcaatataagaaataaagttctgaaatggttttcttcagcacatgcagagtgagccgaccaggttgggcaggtgataattacttttatttcttacgagtgggtatcaccgcggagtggctagaagcttcaccttttattgccttcaccttttattacatttcccacgttgtgcagggctattcattggtaattttattatcccatatcaagatcttgattaaaaaaaaggatgaaatttctaatttcaaaagatatgagtgcaaagtcccagagtaggaggatttggtcctataccttgtgacctgaagagtaaccctccagggggatggactgtccttgtgcccagctccaagtgactgaatgtcactgactagacagtgggtgtctgctggcattcacaattgttcctttttttttttaaatagagatggggccttgctttgtcacccaggctggagtgcagtagtgtgatcatagctcactgcagcctcaaactcctgggctcaagcaatcctcccgcctcagcctcctgagtagctaggactacaggtgtgcccccccaacgcctagttaattatttttaattttgtatgttttgtagagatggggtcttactatgttacccaggcttgtctcaaacttctggcctcaaggcatcctcctgcctcagtctcccaaagctcaggattgcaaggcatgagccactgagcctggcctcaactgttccttttagggactctgctcagggtgtcattttaagaaggatgcttgtcattttaggatggtgtcatttcttttcttttcttttctttttattttttttttttttgagatggagttttgctcttattacccaggctggagtgcgatggtacaatctcggctcaccacaacttctgcctcctgggtttaagcaattctcctgcctcagcctccggagtggctgggattacaagtgcccgcccccacacctggctaattttttgtatttttagtagagacggggttttgccatgttggccaggctggtctcaaactcctgacctcaggtgatccacctgcctcggcctcccaaagtactgggattacaggcgtgagccactgcacctggccaggatggtgtcattttaagaagcatttcatgaaagcacctgccggtccttctgtccatgccaccatcaagatgagatcacctgtgtctcctcccgctccatccactgggattgctcctgaccccacccctgtctgcacttcctcctcaatgtcttgtctctcctccagcctcttccttcccgtggctcttttgctgctcacctgcataactacttggctgcagtcccttctcattctgagccccgactcgtcaagatttttctgtagcaagcagctcctgagtctcacctcaagtagaagagggatacattcaaatgctgtccagttgcacagttgcaggagagacagactcagaaaacaggcagaggcagggaggctggcagctgagtgcaccaccaggctacccccaggacatggcagctggcacagctgctcagacccttgccatcactctgcccttgggcgtaactgggactgatacagtgtcctggcttcaccccctgcatgctcaaagcgcttgatgggcagtacagccagttgcagtgcccaagtctcatgcccacaccttggctatcatgtcccttttggcttctgctgggggtggggatgtgtgtatatggggtgagatgaggtgggggtagatacacaaaacctacccccacaagtaaaaccttgaaaagtttagcttggataaaagcctgaatatttcaatcagaatgtctagaatgcagctattttcgttttagcataagtgtgaatttcttgtttgatggtttggtataatttaaatttttgatttacatgccgggggacaggatacacaattgtctttctttttttgagtgatggggggacagggtctccttctgtcgcccaggctgtagtgcaatgccaccattatagctcaaccttaaactgctgggctcaagcgatccttcagcctcagcctcctgagtagctgggaccacaggcgtgtgccgccatcccagcttatttccagtgtcttggctctggagctcttacctagctctgcctccatgtcattgccaaataaatatccctgagcacaaaatgctcgaatagaaactgtgtgatggagaaagaagtgcatggacttcaaagccagaagcctgggcttgactcctggcagcttgacgtctctggtcctcgctttccccgtttggagatgaagatgggatgggctttacctccctgacagggcagttccaaggggtcagatgaccccttgaacactaaggcccttgggggcagtttaacatgatgcaaatgtggtggtagttactttccttattgatacttactgctctttttttgtttttgagacagggtcttgcactgtcccccaggctgtagtgcagtggcacaatcattgctcactgcagcctcgacctcctgggctcaagcaatcctcccacctcagcctcccaagtagctgggactacaggtgtgcatcaccacccccagctaatgtaaaacatgttttctgtagacatggggtctcacggtgttgcccaggctggtctcaaactcctgggctcaagcaatctttctacctcagcctccaaagtgctgggattacaggcatgagccatcattcctagcagtacttattattagagaacctggacacagtggttaggaattggatgtaggaagctaggtccgattcctggcactgctatttacttgctgtgtggcatagggaaaataacccaacctctctgagcctcagcatcctcattggtaaaatggggacgatgggtcccagctgggaggattgttgagaggattagatgaatgtcacaggagacactcagctcagcccctggctcatgggggtgctatccttatttcagtggtcatgtgaggggtaggggcagtgaggagagacaagcatccttatctcccaggtgtgaaggtgggggagatgacctgtgaggtcactgtagccctgctcagctacagagcgaccttgaccgaaggagtgagtccataaccccaagcccagggggccagtgcttagcccctttgagaggactggctgggacctggggttgccacaccacctcaagcaagcaggctggcagtccagccaaacacagcagtgctaaagggaaagagaggaacaagggtgagcaggaagtcttccagggtaggggagatgcttcctcgctacacccagggcctctggtccagtccggggcttcagccacagggctctgcttgtgcgcatggatttgcatgtaaggaagagatagcctgcaaggaggtttgtaagaggaattagagacatgtaatagattgcagaattgacctcaaattcttctacgtgctgcgtccacaacccgcttttgtgatgttcaacccctcccatctagaggtagaatctatttcaccagcccttgaatgtggcggccacgtgacttactttagaaaatgagaaggaaagcttggaaggtgctcctccaccaggctcaccttcttgccattcttggaagccctgctaccatcaccatgggaagatgccctcgccggagggtgagatacctggtcaacagctaaccagcagacacacaggcgtgggcagccttgattatccagcctgaggccaactgctggcccatgagtgagtccagcagagaccagccaagccagcccccgcatcctgagctctctcagggatcgtcttacccattgcatccagcagcgttttagaccatgattataaccaacacagggtggaaggaggagatcctgggactactgccccagagagaaggctgggggagaccctgcagggcctgtgtgcacaaggagctctgcaaaatgcagggtccaagcagcactgctgtgtggccctggagagagagtgtgaccttcacctccccacccccgcctggggcacagcatggcttctgagcagagaaggctgcagggacccgtaatcccagctacatgggaggctgaggctggagaattgcttgaacccaggaggcggaggttgcagtaagccgagactgcgccattgcactccagcctgggcaacaagagcaaaactccatctcaaaagaaaaagaaaaagaaaaagaaaaagaaaagattaataggtacgactgttgtgcctcgttcagagagtcgcacggtctctgaatgagatgccaagttccctgatgccgtgatgaaatgacaggagtctcactcctttccccattctttctggatattcagttcaaacagcttttgggaaaaatcacaattttatttccagatctcagagattgatatcatactatgcattttagggcttgtggggaaatgaaccgaaatcatcctgcagtggtgaggccggggcaggggctctgcacctgcaggtcctccaaagtgatgccatctcagttcccagacgagcccacctgcaggacccactattgcccagcacgaggtcttcctgagctttcctttccaggtgtggccaggcagctgccctcattgctcagagtctcagtaccagccctgttggggcagcagccaggcctttcttcacagggatctgggagcagaagagacctaaaatctccagcaggtgccatctctgcttgaaaggaagaggaggccaaaactgggctgagaaaagctcatgaaattgttacgaatgttccctgaactccaggctggagaattggctgcacagaaaactgtttttagctttggatgtggcaccaaggacagactttgtcccttctgtcatcagtggatgcttgttatgtgaagactaacggcactttctgagggtctccaaatcctctggggacagtccacaaagcagaacgataagtgccaggctcctttgcgggttagggggataggtgggtgggaatgcagcccgcccccagagatgctgatttgctgggcttgagtgcagctcaggctcctggattttgctgttattgtttagagatggggtctcgctctgtcacacaggctagagtgcagtggcatgatcctagctctctgcagcctccaactcctgggctcaagcactcctcccacctcagcctcccaagtagctgagaacactggcacgtgccaccatgcccagccaaatttttaatttttattttttgtagaaatggggtcttgctatattgcccagggtgcaggctgatctcgaattcctaggctcaagccatcctcctgccttggcctctcaaagcactgggattactggtgtgagccaccttgcccagcccaggcacctggatttttaaccaacactccagctgcctgtggtttgtagccaggtttggagttcgttgtctgggcagccacgtaaggaagcagcctctcttgtgcctggaggtcaggctggccctactggctgcctctcctgagatgaagcttggccactgggcatccatttcccagcctggtttattccctctcttcccccagtgagggcccatcaagccctctgataccgactccttctgccctccccacagctcgggcaggaaagctcactggcctggccaggggactcatgggatctacaggggctccctactcccacccaagcctggcaccaagtacaagcttgctgagatcaaatgttgtagcgttgtgtggagagaaatggaaacagctactttggaaggtgctttggcaatatgtgtaagaaagaaaagaaaaggaaaagaaggaaggggccgggcacggtagctcacgcctgtaattccagcacttcgggaggccaaggcagggggatcacctgaggtcaggagttcgagaccagccttgccaacatggtgaaaccccatctctactaaaaatacaaaaattagccgggcctgatggcacatgcctgtaatccaagctacttgggaggctgaggaaggagaattgcttgaacccaggaggccgaggttgtagtgagccaaggttgcgccactgcactccagcctgggtgacagagcgagactccatctcaaaaaaaaaaaaaaaaaaaaagaaaagaaaagaaatagaaaaaggggttaattactactgactttacagaaataaaaatgattataaaggaatattataaataacatatagcaacaaattggataacctatttgaaacaaacaagaaataaccataaaaatgggcaaccagcagccattcttttttttttttttttttttagacggagtcctgctctgtcccccaggctggagttgcagtggcaaaatcttggctcactgcagtctgtgcctcccggttcacaccattttcctgcctcagcctcctgagcagctgggactacaggtgcccaccaccatgcccggctactttttttgtatttttagtagagacggagtttcaccgtgttagccatgatggtcttgatctcctgacctcgtgatccgcccgcctcagcctcccaaagtgctgggattacaggcgtgagccactgtgcctggcccaggaatagccattcttttattcctctactttctttctttcttttttttaaatcgaaactattttttattaaaggaaggtgcatttagattaaaaaaaaatttttttattcctctactttcttaataaacttgctttcacagtgctctgtggactcaccctgaattctttcttgtgggagatccaagaaccctttcttggggtctggatccagaccgctttctggtaaccaccatgggtcctggagtctgtggaacctgttcccagacacccctacctcacccccacccagcccatcaccactgctgtcctgtcccagcttctggttgcagagtgacacggtaaactgtctggggaggggaggttggttgctttgtgttttgcaggaaaaggcctggttgtgatttataagaatcacagacagagctctccaggggtgggaccaaggggacacttggggtctgtgaggaccaggggctgccatggctgatgggagttcagaccccgcgtgccgcgccccaattccccaccctggccccaccacccctgcctgcctcactccaaccccaccatccaaactccatctcttcctgctactgaccccatcttccaacctccacctcctggccccagagcccctatgctcaaccccagcttgaccccggagccccacctccaccacaccaaccactacctctgactctcatccccctgcctctccccctgccctgccccttgcttcccaccccagggtctgctagctcctcccacctcatctgctcagctctggagagaattgggaacccatcctttggtgaggtggctgctggtgagaaagaaaatggtatttgaggcttttactcatcaaggaagggaatatccccctccccctcccaggacttgcaaggcagcgcccagccccctcctccttcctggtttccagcctcctgtgtggtttccatggattcagagatttccttccagcacctgagccccgaagtgagggggaggggagggaggggaagggcccagccatctaggggagggtggtggagaagctgctccaggacggaccccacaggtccgctggccccgtcccctgctcccagagaccctgaggctgggcaccagaggacttgctggggactcgctgggggcctgacaaatcccaccctccttctggatggcccaggggaggtcatcccattgggtcatgttgggtgagaagagctgtctcaaatcctgaccctgtccctgaccttgacccctactacatcccaaatcccaagacctggtcccagaatccaagccctgggttctgacattcagtggactgtgaggaggacagttcagggaagggaccaaggacatccctgcatcagcctccatcctgctgagaactcactcgagtcctgtgtttctggggctccagtgctgcctgcatatctgggatcccagagagaaggcgagaagggtttatggtggggagttagtgagcatcaggcacttggggttctccatcctgcccagcatggccccttccagaacaggcacacggtgtttacgacctcctccccctctgccagagtccccactctgccagagtggcaggtggagaagctgtgggcactgtcgtggtggctgcccagaaccccgacaccctttctcttggagggcagctagggtgcaggcccaagcacggccaggcccatgcccctgcccaggcttagctcagccagaaaagattcgtcgtggctgcagcagagcaagaatcagagccggaggctggggcagctgtggtggctgcaagggcagagccagttgcccacagaaaagctcggcccaggtggggttccttccccagcccaggacctcacaggttctaagagctgcccaatatccttccgatggggtccttttctgcatacatttgtctgcgttcatttttattggttgcggttgagagctcatcctggcatgacatttgccagtgggtgggtaggtggtctacactcttggttaggctcttggagaccaactgagatccagagggactactaccatatgaggacccagtggtcctctgccctggcttccagtagaacctgctggagtttatttatttatttatttatttatttatttatttatttatttattgagatagggtcttgctctgttgtccaggctggagtgcaatggcgcaatcatggctcactgcagccttgaactcctgggctgaagccatcctcctgcctcagcctcccaagtagctaggactacaggcatatgccaccatgtccaaccaattattttattttttgtagagatgggggtctcactatgctgcccaggcgggtctcaaactaccaggctcaagctatcctcctgcctcagcctcccaaagtgctgggattatagacttgagccactgcacttgacctcttggagaatctttaaaagcttctagcaggtgaggcacagtggtttgcacctgcaatcccagtactttgggaggccatgggaggaggatgacttgaggacaggagtttgagaccagcctgggcaatatggtgagagctccatctctaaaaaacttttaaataaaacaataaaataaaagctgttagtgcctgaacttcaccccagaccaagtaaaacagaatttctaggcatgggaatttgtggaaactccctcagagttttcatggggaatactgggatttttgacagctccctggttgattctgctggaagccaggaccaagaaagcttcaagacagagtcctccccaacagggacagtaggtgctgggggcaggggagggaaggcagggggagcccctgggcatggcctcctctcttcccaccctgtgcgtgacagctcccccttggtccccatccctctgccttgcgcctgcctcccaaaggctgcccacgggtcctgctcccttttcctctttgtcccttcatcgcacagtccagatcttgcctcagtcttcacagtcagcccagatgactcatgaaacctggaaaggaagccattcatttgcaaccttaaaacagtcctcttctttgacccagaaactccgctcctgggtatacgctcagcagaaatgtgagccgacgtctgctggcagacacaggcgagaggtggctcatagctgcactattcaacatacccccaaactggaaactccccaaatgcccatccacagtaaactggatgaataaagtggtgttttcatccagtgaaattcacatcacaaagaggatggatgtcagaagcacgacactgagtgagatcagctagacacaaaagaatctgtgttgtatgaccccatttatttaaagttaagaagaacacagaagccaggcgcggtggctcatgcctgtaatctcagcattttgggaggccaagacgggcggatcaagaggtcaggagttcgagaccagcctggccaacatggtgaaacgctgtctttactaaaaatacaaaaaattagccaggcgtggtggcacgcacctgtaatcccagctacttgggaggctgaggcaggagaaacacttgaacccaggaggcagaggtttcggtgaatggagatttcaccactgcactgcagcctgggccacagagtgaggctccatttcaaaaaaaaaaaaaaaaaaaagaggaacacaggaaaaactaatctaaactatgggaagtcagagtcatggctcccggcaagcagtgaacggaaagggacacaggagggacttctggggtcagggatggcaggtttaactcgtctgggtggttacaggggcatatttggtttgtgaaaatgtaagaagctgtgtgcttacagctatgcacttttcagtgtgtattattcttaagaaaagctgtcacaattaatctagctgccctcaaggaggacaggggagagaaacgtttgtattcactcttttcaaggcaggaaagaagaaaatgtaacctgttaggtttcctttttttttcctttctttatttctctctgtctctccctttctttctctttctttctttctttttttttctttctttctttcctttcctttctttctttttctttctttttttttttgagatggagtcttgctctgtcgcccaggctggagtgcagtgatgtgatcttggctcactacaacctctgtctcccaggctgaagcgattctcctacttcagcctcctgagtaactgggattacaggcatgcgccaccatccccggctaatttttgtatttttagtagagacggtgtttcaccatgctggccaggttggaggtttccatttttaaaggcagttggacatttatatcctgccagggagttccccctactgctccccaaaagcttccttttactctcacacctggattgcactagactccaaggaaggagaaaacctccacttgggggctgggagacggggacaggaggagcagcagcccagcccagcccacctctttgtccctcagaatccactgaacacctttcagccttgtcccgctgggacggtcaggattttagggctctggggatcacttcttattctattttttttgtggggggtggggcacagaatctcactctgtcatccaggctagagctgaagtgcagtggcgcgatcaattttgtttgttttgtagagatggaggccttgctatgttacctgggctggtcttaaacttctggcctcaaacaaccctcccaccttggcctccccaagtgctgggattatagtcatgtgccactgcaccctgttcacacgtcatttcagatggtaaaaggagccaagaagaaaacagaccaggatgaccaagggactctagagagggtagagatgacactgaagctgagggttgaaagggcctgtctcctcctcctgccaacattggccttggcctcaagtgatccttccacctcggcctcctaaattgctgggattagaggcataagcccccgtgcctggcctcactccctatttttgaaactgtctcttgcttgcctcccaggtgccctccttctcctgactgcccctctggtcagtccttctccagctgctgagactcagcccaacccttgggaagaccctgtcttttccaactgcccatgaggtgcaggcaactccagcagccctagttccagctcagagtcttccctggctccatttctgtattgcccatggcccctctcagttatttccaggtgtattcatccgttctcatgccgctgataaagacataaccgagactgggcaacttaccaaagaaagaggtttattggactcacagttccacatggctggagaggtctaataatcatggtggaagaggaaaggcacgtctcacatggtggcagggaagagaagagagcttatgcagggaaactccccttttcaaaaccatcagatctcatgggactcatttgccatcaagagaacagcgcaggaagacccgtccccataattcaaccacctcccacagggttcctcccacaatacaatgggaattgtgggagttacaattcaagaagaaatttgggtggggacatagccaaaccatatcaccaggcaagacaaagccttaaacaggcacagcttacccaccgccctgctcactgccttggtattccccatctcagaatccacgaggccagctgtccacatcagagactgggtgttgcccactttcaaagatacatccaagccatcaccaaatgctgcccatccttctaaatatttctggaatccctcccctcgcccagccctagtctccctgccctggccaggccccctcttctcccaccccggttatcactagaaccttcaacaagaccctcccggcttctgctcagcagttctttaaatgaaaatgatctggctgggcttggtggctcacacctgtaatcctagctctttgggaggccaaggtgggtggattacctgaggtcaggagtttgagaccagcccagccaacttggcgaaaccctgtctctattgaaaatacaaaaattagccggccgtggtggcacatgcctgtggtcccagctactcgggacgctgaggcaggagaattgtttgaatccaggagatggaggttgcagtgagccgagattgcaccactgcactacagcctgggcaacagagtgagactccatctcaaaaaaagtttttgtttttttttttaaataataaaagcagtgtgatcttctccctcctggctgcttacaaggatgctacattactcttaggccatcggagtgaggcctcaagcccggctgcattttagctatgcctggatcccatccccagccccacctgagcctaactcctgggtgtggggcctcaaacattggtacaacttgaccgtctcctgtggtcagctccagccccatcttcctgtgttctccttaccaggtactgggctcctaggcttctgcacatccaagacgctgtgcccctgcctcaggcgctggtcctccctgccacatcctggctccacctccttcagatatcaacttggcccctttctctccttccctggccacccctgcctcctgcctgcccactgcccttgctgtatgcactcacccgcacctgcgtcatccccatcaacccacactctcctgggaagccctttgacttgtctgtgttcctgtggggagatagctcccaggagagcagggctcaccccagcttccacctgcctggcatggagtacacactcctggacaaagactctctcctcggccacactcaggctcctccaagccttcttcttgatgagggctcaaccttggcctgtaagaattgctgattcggcggggcacggtggcccacgcctgtaatcccagcactttgggaggcagaggcgggcagatcacttgaggtcaggagattgagaccaggctggccaacatggcaaaaccccgtctctactaaaaatacaaaaattccccgggcgtggagctgtgcacctgtagttccggctactcaggaggctgaggtgggagaattgcttgaacccaggaagcagaggttgcagtgggctgagatcatgcctgccactgcacaccagcctgggcgacagagtgagactctctcaaaaacaaaaacaaaaaaagaactgcagactcttagcccatttccatccaccagcacccctgcacccaccaatgcacaccaagagacttggagcaaactctagcctggggtctatcagctgaagactgcattcttgggaagacccagaccctgcttagagaactcaagcctgccaaaaatatttactgtctgttcctgccagcatctgaagatagggccctaatttcaataagcaccagttagcaaactcagatggcttaaccccagtgatcaacctcccctccccaattttctttttctttttctttttttcttttttgagatggaggcttgctcagtcactcaggctggagtgcaatagcgtgatgttggctcactgcaacctccatctaccaggttcgagtgattcttgtgcctcagcctcctaagtagctgggattatgggcacaaacagccacgcccggctaatttttgtatttttagtagagacagggtttcgccatattggtcaggctggtctcgaactcctgaactcaagtgattggcctgcctcagcctcccaaagtgctggaattacaggcgtgagccaccacacccagcccctacccacttcttatttcacctccctgactctgcacaaacccccactggttccacctccacccccttttccctttaaaatgcccagtcaccgctacctgggttagagttgagctgagttctacagtaaagtctctcctactgcagtagttactgactgaatagcatccatctttaccacctctttttttttttttttttttttttgagtcagggtctcactctggaggctgaagtgcagtggcacgatatcagctcactgcagcctcaacctcccgggctcaggcaatcctcccaactcagcctcccaagtacctgggactacaggtatgtgtcaccgtatctggctaattgttttaatcttttgtaggtgaggtctcgctttgttgcccaggctggtctcgaactcctggcctcagcctcccaaaacactgggatgacagacatgagccaccatgcccggtgtctttaccagctttaactagcatctggctttgtgtccctccaacatcctttagcagtggctgaacgcttgtatgacagacaggtggaatgtgaacaacctcattcccacctcccagaggaagatctgaagtcctgtggctgttgcacttggacaagcccacgcaggagggagtggtacccgctgagccaagccccctgctcctaagtgagctttccaggtgtcctgatttcctggggccactgtgatgaatgatcatgcgctgggtggcttaaacaacagaagtgtgttctttcacagtttgggaggccagaagtccaaatcaaggtaacagcaaggtgggttcctcctggagtctcccagggagaatgcatttcctgtctctccagctgctggcaatctttggcattccctggcagcatcactccattccctgcctctgtctttgcatgacgttctcctctgtgtcttccttgtgtctgtcccttaaaaggacactcatcattggatttagcacctgccctaatccaggatgatcgtcatcttgagatcctttacttaattacacctggaaaggttcttattccagataagatcacattgtgaggttccaggtggacgtatcttttatggaccaccatccaatccactacaccagggctcagcggtgggtaccctcccttctttctggcacagatgctggcatcactagcgtgggaaggcagatccatgaggtggggagagctggccagggatggtctcaggagtgtggaggggcctgggatggagaacctgagacccccctgcaacccagcttctggcagacacaccctcctggcctcctccccaaagacaaacactcggtgtaaagagacctgggttcaaggcctggcttcactccttgactcatgtgatctctggcaagcacgtgccctctctgggcagagatgattccccagctcctcacagccctggctctgggactctgagtgggagctgacagcaagagctgtgtgtctgcatctcagagcctggcaccctttacgtatcagagcacagaatgacactgaagaaaggagtgattgagcagtggctgggtgtgccttgggatgtgctgaactgggcatgtggtgggatctgggaagcccctgaattccccagatggtcatatccccactgcagaggtgatgttccctgctgatataccactggtggctcagggttgggccatgcatattctatcactggaggatcaggacatgaggaccagccggggtcaggagtctgcagctgtgcttaggcaggaaggtgaggagaggaccaatatttactcagctccatctcctttcagtctcataatgtgccaacaaaataggtcccattatatgcccagtctatagatgaagacacagaagctcggagaggccgagcaacttgcccgaggtcacatagttcttgaatagggcaggattccaacttggtcaattaggcttcagagttgctccctaacacatcatcttcacccctgaggccaggccagggctctcagtgcccagagtagaacaataaacacatcacacaggcttatcaaccacatcagggaccctgtcattctattctcaaaaaatatttttaaccatggttgcattagggttgtaagattttcagagctctttttctgtttttcaaatgtttgctaatgtgcttatatgatctttatcattaaaaaggtaaacattgaaaaaatcatctactaagtggcttctgtcaagagtgcagctagggtagttgtcattcggaggaggctattccagggacaaaccaacaatttaaaggttttctgctgggtgcagtggcttacacctgtaatcccagcactttgggagaccaaagcgggcagatcacgaggtcaggaacttgaaaccagcctggccaacatggtgaaaccccgtctctactaaaaatacaaaaatcagccaggcgtggtggtaggcgcctgtaatcccagctactcgggaggctgaggcaggagaattgcttgaacccgggaggcagaggttgcagtgagcagaaatcgtgccaatgcactccagcctggcgacagagcgagactctgtctcaataataataataataataacaacaataatgaattatccaagccctgtttcccttgtttctacccagatcaccaaaaagtgtatttctctgctttcacacagagctgtttttaccaaaccatgtcttaacactctgtccttggtttcggctggggatcagtagattaaatgtgcacgtgtagattgtctctttatttcccacaaaactgttctctcaaacaccgcctattgtgtccttcacatttcttgcaaagatccaattgacaaactcccgttagcttcatagccgggagaaatgctctcttgatcaatctgtaagctcccgaagagctcaaagatgtctgttttcacccctgctattttcacagcgcccaataaagtactaggcatttactctgtgctcaaatattgctttttgagtggaaaaaaaaggcgttgattgactcatacagctgagaagtccaaaggaatgtcttgcttgcttcagttacggctggatccaggggtccaaattgtatcttcaggaccctaccctccctcttttggttccgttttcttgtgttactggcttcattcttgggcaggctgactgcctgtagcagccaaaacagccactcacatttcccaaagttccttccacacaccggtttgcaagcctggagaaaagagggcaagcactcagttccccaaagttccagggaagatgcccatcagctggcttgggtctgtgtgcccatcgctgaaccaatcagggtgtctggggggaatgacgtaatttcattggccaggtctgggtcaagtcccactcttgaagccagggggcggagtcagctgcatcccactcaaggacacagcaaggatgggctctattatcagaagaggaggtagagaaaggcaggctgggcaggaagctagagcactgcagtttctgcaacatcccaacctggattcctgattttgccgccatattgataaacggtgcagccaccaactctcccgttcctacagccagaaaattattgattattctttgttctttctttttttcttttcttttcttccttccttccttctttctttctttctttctttctttctttctttctttctttctttctttctttccttccttccttccttccttccttccttccttccttccttccttccttccttctttctttctttctttctttctttctttctttctttcttttttttgtgagacagagtcttgctctgttgcccaggctggagtgcagtggcgtgatctcggctcactgcaacctctgcctcccgggttcaatctattcttctgcttcagcctcccaagtagctgggactacaggtgcgtcccaccatgcccggctaattttttgtatttttagtagagacggggtttcaccatgttaggatggtctcgatttcctgacctcgtgatccacccgcctcggcctcccaaagtgctaggattacaggctgagccaccgcgcccagccttctattaattaattaattaatttatttatttattttgagacggagtctcactctgtcacctgggctggaatgcagtggcgagatctcagctcgctgcaacctccacctcccaggttcaagctattctcctgcctcatcctcccgagtagctgggattacaggcgcctgccactatgcccagctaattttttgtatttttaggagagacagcgtttcactatgttggccaggctgatctcaaactcctgacctcgtgattcacctgcctcagcctcccaaagtgctgggattacaggcgtcagccaccacacctggccaattctttgttctttcctttcactcccttgcaggctggtagaaacttgaggcatgtggctactatgttcagccatcctgcagtccagccccagcctgggagctgctaccccccagcccacatccagctccgagaaccctggaactgagacggcattatacccattttatgggtaaatgtgccaaggccaagctgaactaatgatgtctttcctaagttcacacaggaagctggtggtagaatctgggcagagtctaggtctccaactacttggttcagaaatacacccactcatgccccactctgtatcctatggccctggtgcaccaacagaccatcagcaccaacaagccaagctcccccatccaaccacccacctccagcgcagccagaccccagggttcaaggcttgggggcactgggctccctcagcagatgcatgtgcagggggcaagcctcctgtgtgtagaaggaaactgtgacagcattgaggatatctctccttgggagttcctggcttctggatgcccacgcagctggcaggtgtgtctgagcatgcactagtctctctacaaagcaagaccccgcatgaccaaggcttggaggacctggagccgagaccggttgctgctggggacacatgtgtgtacccttgctcatggaattcctggcactgggacatcatagtctctgatacagaagaaaggaagtgctgtggctcagattccaactcagctcgcacagcgtgggacccccgaaaggcatctggacaagtgcaaggtgcagctccaggcagcgccccctggagttgtccatcccgccccggcatcttcatttatggtatcttgtttcttccttgctacagctcccagaggaaggcatatggtcatctgtgtcagtaggggcccccaggaagcaggtactgagatggggttggagatgcaacaggtttactaggggtaaagtctatggaagataacaggggaggaagtgattgggcagggagagccccagacactaatgaaagctcacaaagtttcagccaacctattggggagctccgcagtagaaagtgcccacaagaggagtccaggttaggcacaaatggccaggtcctgggccccctgccatgcacagtcgctggttgacgaatgcctgggaggagcctggcttcattcagctggaacgctccttgcacctcaacagcaattctagaagggaggcctgagcaccttcatggcagcctcatgatccatttcacagatgcagatgccagagtccagaaatgtcaatgaccctcccaaaggcacatggctggcacatggcagagccaggctggcatgggagcatctgatcccaatgccatgctcctgtcagccccagagtgactcttggctgctaagatgccctttgctactgctgggcaggactctgggacatgtttcccttccatcctccagggacagtgacaaggtggcctgacagagtgcccaggtccctgctgagccccggccaaagctcctgtccctgggaaacatgagtagggacagcccatgtcatgcttcagtctttccaaatctcaggaaactcttgggtagagaagccacttcaatgtggcagcttcaattctggcagggattcatcaaaagtccacagtgtttcccgcaccttccaggtcccctgtctgtctggggtcacccaggaccatctgtctgtcaccacagcggtgtggaatgctgaggatcacctctgtggtgacagacagatggccctgggtgaccccagacagtcgaaaggatgacttacaagtggcccaactggagagattcccatagggctggctgcagtggaaagttgctgccaaatgcccatctcgttccataaccctctcttggtgcagcagcagtgcatacaagtgtcccagagggacaatgacggctgcttcagcttgaatcacaagggaggaggtagggtgctggatacactcaattatcaccccaaaccctatcatcactcataatctgcctgagataaatcacaggcaggtaattattatgtcaggccaggtagcagagaggagttctaaaatagcagtcaaggaacttcctggttaattcaaatccatcctaactccctccaggggacaaaagtgctttggctgtagaattgaccaggcggagagaaatacgattgcttgatgcaaaatgggaactcctggacttaatgtttctctctgtcaagtttcagaatagcacacctgtcagaaaccctaaatcaatgatccaccatccggcgtaaatcatactgcagggatgtcctattttcttggtgtcaaaaccaacctccccagcctgctcgccagaccgtgtccacttctgctcagcccaggcctctggacccaattagtcctgcctgcttggcttcccacacctgtacttcttcccccatccaaatgccaccaaggcccagctcaagccacctggcccccaaaccttctatgcccaggcccatccctggatccagcttaagcgattccacttcctgtccccactgcaaaaggccaatgctgggtttatccatccctgaactggtcacaaccccagatctgtggctctcctagagctgggtctccctgttcttatccttttggcttctggagccagctcttctgctgggcaacagaaactgctttggattcacttaagccagaagagtggaggtgggtttactggaaagatgctgtttgtggggaggtttcttggagtgccaaggagcagaacacccgattcacccgggctgagtagacccctgtccagggcaggctggcctcaggtggggctggattcaggcacaatctctgggctctggctgactctgtggacgactttcctaggctcttcatggtggcagagtggttgcttacacctgtccaagtgcaggtccacttggacatggcagacgattactccaagttgctcagacaaaagccctgggctagggccaggtgcagtggcttagcctttaatcccagcactttgggaggccgaggtgggtggatcatctgaggtcaggagtttgggatcagcctggccaacatggtaaaacccgtttttactaaaaaaaaaacaaaaaacaaaaattagccaggcgtggtggcgggcgctgtagccccagctactcgggaagctgaggcagaagaatcgcttgaactcaggaggtggaggctgcagtgagctgagatcacaccattgcactccagcctgggtgacagagtgagactccatttcaaaaaaaaaaaaaaaagccctgggattagtcttcatgaggcctgactatgtgaccagaggcacatgcccacctcagggccaatcctggtggccacgggagagcagtgttctcatgggcagaggccctgggtcacaggctgctgcccaggtggacggggcagctccacctgcagctcatagactgagaacatgggagtagtgattcccacaggtcaatcagggcaccaacaagaaggaatggatggtgggcagctccagaccaacaaacaccgagaagttggctctctggaccagagagactgctgaacaaaatcagactggcctggaggctggagttttggggttttcctctccctgggactggccatgaataaggcactcaacttcaccacctctggttcctggaagagaaaatccacttggccagttctgaatcacaggtgctgcggccagggcctggccgagtcttgggtacatttccagagaaggcagaaagggctttgagagccaggagacatcctcccagcagctgctaaaatgtggatgtcgctactgtttttgtttttttttttagacggaatcttgctctatcacccaggctagagtgcagtggcgagatcttggctcactgcaacctccgtctcccaggttcgagctaccccagcctcccgaatagctgggattacaggcgcctgccactgcgcccagctaatttttgtatttttagaagagacggggtttcaccatcttggccaggctggtcttgaattcctgaccttgtgatccacccgcctcggcctcccaaagtgctgggattacaggcatgagccactgcaccctgccggatgttgctaccgttgcaacgcaagccaccttaactttttgtttaccccaaattagaaattaaacaattttattttcaatgtcaccagtatgtgatgcaatttcatgatgatggtttatctgagtagaaaattgcccttggtatctattctaccctcctctgctctggaggcctgggtatagctgaagccacagcagggatgggggcaggtagggagtgggagttggcgagttgcccattttctcccttccctggggtcaggaggaaaaaaaatgccattaattttgttgtgatgaaaaccccatctctactaaaaatacaaaaattagccaggtgtggtggcaggtgcctgtaatcccagttacttgggaggctgaggcaggagaatcgtttgaacccgggaggcagaagttgaaacagcgccactgccctccagcctgggcaacagagtgagactccatctcaaaaaaaaaaaaaaaaaaaaaaaaacccacagataaatttggagagaacttgaatctttacaatagcgagtcttctcatctgggaaaggcccatttctctctgatcctccaggatgttctcagctccagcccctctcccccaccatcccaggaatagcagtgaccttttgtacatatgccttagtccctcatcctccagatacatttaagcgctttgtctcaggcctccctgccaagcccacatctgccaccagcctcgtgtcctctcctccccagcctcaaatcctgcgctggctggatttaggaacttgggcggcatgttcctccacacctccaggctgcggttcaccggcacgctcctcctgtctcatccaccagggattcctatctgtcccttacattgtttccctctctgtagagccaagcgggaagggccatgttcacctttcagctcggtgccccacccccatcccccagttgctcactcacatgcacaagttcatcttgctgcaccaatgagtcttctcctccatgctcacccagtcttccttggatccccaggtgtcgtcctgggtgtgtccggtggtgggtgctcagtaaacgcttgctggatggaaggggagacagcaccactgtggggggcggggactgtgtttccaccagccctcggtaggatctttttttttttttttttgagacggagtctcgctttgtcacccatgctggagtgcaatggtacaatctcagctcactgcaacctccgccacccggctccaagcgattctcctgcctcagcctcccgagtagctgggactacaggcgcccaacaccactcccagctaatttttgtattttcagtagagatggggttttgccatgttggccaggctggtctcatactcctggcctcaggtgatctgcccgccttggcctcctaaagtgctgggattacaggcgtaagccaccatgcccagccctggattgagaatgttctaaagacaagagcttttgggaacgctgcagcaggagacttgcaggtgtgcagagggctcttgggggcctcatgagcagctggaggtgacccctctccccacatgtcttaaacaagggtacttggccaagacagtacaactggaaataaagacaacgaaaaacagtccaaagattagaaagcaagagacaatattatcattcttggcagagaatgtttatatttacccagaaagtccaagagaattcattgcaaaacagaactgctaagaaagcctggaaaagtggcctgataaagacccatagcttcctgcatgccagggacgagctgactggaaaataaagtggaaaaggcctcattcacagcatcaataaagtgataaatgacaccagcttaacatgaaataggccagacccatacaaagaaaaagagaaaaccataaaaagggcaaaaagacgtgcctcgttagagagaaatggttcttccccggatgggaaaacccgctagcgtgaagattcaagttctctccaactttacccgtgtttttattgcaattccaatgggaaaataattccaaaaacattttcactggtgtttgccagaaaaatgcttatgttcctcaaaaagaggaggtgcaggctgggcgcggtggctcacgtctgtaatcccagcactacaggaggctgaggcaggtggatcacttgaggccaggctggctagcctggcgaaaccctgtctctactaaaactataaaaattagctgggtgtgttggtgtgtgcctgcagttccagctattcaggagactaaggcaggagaattgcttgaacctgggaggcagaggtttcagtgagccgagatcatgccactgccctccagcccgggcagtagaggaggtgtggtagggctgaggcgcattgccatacccctgtgtgcatgcctgaagggacagggaggggacttcctctccagctgcctagaggaatattgcagccagctctcttagcaaagccacatggtcaccgtgagcttgggaagtgtgggggcacctcctatgtagtactggctctgagaggcttgggccttagtgctgttttcccctagtgggggtccctggacaaatgatgttgccagcagtgtgttccaaaaccaccacggtgggagggatgagcgtctcctgcaggtcatgacactccaggctggaaagcatcagagaacagagcatggctgtgggccctggggaaggggacctgtcttagtctgtgtgggctgctataacaaaatgccttaagctaggtggcttataaacaacagaaatttatttttcacagttctggaggctgggaagtccaagatcaaggcccaggcagattcggtgtctggtgagagcccgttttctggtagaaggtggtgccttatatggtggaaggggccagggagctctttggagcctcttttatatgggcactcatcccattcacctcccacaggcctcatttctaacaccattacattggtgattaggtttcaacatatgaatttggaggggagtgactgaacatccagaccacagcacgatctaattggctgagcccaactcacaaactagacttgcgagatggctgtctgccgaggtctccttggccctgaccgggcagagggggctcagtagggctcttgagggtctcagcattgtgaagagcttggggcagaagggtagggcaagacaggaggatggtgagggcctggctgttggccacagagtgacctctgtccccaccctctcccggggcttcctagggctgggaggcagagcctggagtcttctctggtctgcagctcctttgttgtgtgacctgaactatgcttctgcttggtgtctcagtttccccattggtaactggggcgttgactggatttcagggctcaactgggctccctttctcggcaggtggaaattgccatcttataaaggggaacctggatgctgctggctgggagcactgggtggaccaggccacagccgaaggcccaggagaggtggagagaggctccatcctgagtggggctcttctaggccctagagtctcaggccactcatgccactacagagggagagacaggggctacatagggagggtgtggaccaatgaggggttcagggttcccaatcccacatcacgccttcccgtgaacctggagatctctcctgtcccaacaggcctggaaccagctgttggcatcaaggccttgcacgcatgacccagacagcttcccctctccctccttccagcctgctgcttccatactagattcggggccattttgccgcaggattcatcggagggccgagagggagctgccggcttttccacctccgagccgaggttactctcagattcatgggaagccataaacccgcgccctatttctgctctaattgaagcgatttgtattgtgactaaaataatcagagacaattttattggtatatttttaaaaataattacagcccatatatttatgttatataactgcagtgacaatttgattgggttccccagggccccaacttgaagagcctgtgtgggagtggccccatccctgccttcagcaccctccacctcccccaaatctcgggcagaggtgatgttgacagatgcagtccccaaggcctgaggctcggtcagggacttttcagtgggcatgtcttaaaaattttgggacagccatgccagcccagcgaccccaaagcgccgtagggaggttgggaagagatggaggggggctctggagtctggctcagctctggcctttgtggtgggtgtctgtgccctgccatccagcatgcagtcactgaccttcttctgttcttctctggggacctcctgcctttgtcctcctgcttctgaacagctgactgtcccaaaaactctggggttgaccaatcagagcatcacattctccagccatggtgattggttcagggctaagcacatgacccaatcagagccaatgacattgcacatgccccagatggactcccgaacggttggggatcccgagccgcaggctgccatcttgccccatgtgggcactggagaatggggctagtgtagagaagaccctagaagagagatgtggatgggacagggtccttgtggcatcatttgagattctgaacctggagctggggctgctcccagagtttttggatatatgagccaatacatcccattttggcttaaacctgctgtagctgtaggactgtgaccaagagttctatttctatgagtcccgcaggcttgtttccccacctctaaagggagagagtaatcactcccgtggtctgttatgcctcgtcattatctgtgtatagtagagatatcttggtgtatagcaccaagcacaggacttggacagagttaaccactcaataaacagcagccatggccgtcgtcaggagcattgtggagcactggatgctgtcgctggtataaggtgtgggcagaggagacagggagaggttaccaggcaatgtcccagcccagaaggaggccctgcccccacatgcttataggtggcagaagcacggttcctgctggctcagcaatgcctccttgccttcttccatcagggcccctcctgctcagccagggtcccgtactgtgcccaaaccagttctgcattgttcctccccaaatagctcaggctggaaggaaggagctagggaagtgaggaggggctagggagggggaagagcagcggccatagctccagcacagtaggatctgactatgggcgggagagcctcgatcgcggggtgctctggtgcccaacttggctccttcctcttagcgatcgccccagctctttgctgagctgttggatgcctcagtgttcccaggcaaatccccctggggccctacctttggagctgagctgtgtctggcctgcacatccaccagcaccacaccaacaccgggcactgaagaccaaaagcggatccaaactcccacccgctctgagcaggttttctctcctacggcagccttcacccggaagccacagctgttaaagctgctagcgggtggtgagggccttgtggttctgcacccaagaaagccttctcttcactggcttcaaaccatcttagtcttagatagcagcacgggcctcagggatagcccccaggtctaccttgtgggaatgacaccttccactcctggaggcttgtcccatgagtccactaatagggaaagggctgaaaagagcgctggggctgaaacattcagctggctgttgggtccccaggccctcctgactgcacagtttagtggagacgtgcaaactcgcccagttgcacacactcacatgtacacatatgcacacgcacacacacacgcacactttcacatgggcatgccacacatacacacatatgtgcgtgctcatacccacgcacactctcacatgggcttgtcacacatacacacatgtgcgtgctcacatccacacacactctcacatgtgcacaattgcacacatgcacactctcacaggggcatgttcacacccacgcacactctcacatatgcataattgctcacatcggcatggtcatacacatgcatactcacattgtgtacacttacacacacacacacacacactcctacacatgtccacactctcatgcatgctctcacatgaaccaaaatacttgcctcttctgcctatagcagagcagaggtgcgtccgtcgatgccccatggtgtttctcaggatccacgcatcccatgtactgagtgttgttagccgggagattgcctgctcctgtgtggctgcgctctcaccagtcctgaaggtccttataaacattggtgccacccatcttgtaggacattctctgcccggccccaggagcctcagcagaggtcccctgatttcaaacattcttttctgtcattagagcttatgttccacagatgactttgaaaatcttgccaccttcacaggcccagacatgacggtgcagaggacatcaggaccagcaggacataaaaccctcacggtcacagggagaaagtcagatcccgggcacctgacacagccaagccctgctctcaacatgtgtatgacaatgggtgtgatagaggtgccccctgcctctgggtctgggttacatgcccccttctttgagtcctagagggaacagcctgatagtgggcacaccccttcctctccctgaaatgacctggcagacccccttcccccagtgatggccttagggattcccagccatcacccctccctccaggaacccctcatcccatccttccatagggccaccacacagacaggccctctcgacctttcccaccatgctctgcacaactaggatgggcagtgccccacccaaagcactgcatgccccgctccccattgtcacagtaggtacaggacatgggtctattagatcttagacactacagtccgtacatgccaatccattcccagaagacctcccctccccaccccagtgtcactgagccacttcctccagcacagccccacggagggaggcccttttgtgtcttgcccatcacctggctggccagatctgctcagctcttccctgactcaagaaaaacaagagagcttcattagtccgttttcatgctgctattaaaaactgcctgagactgggtaatttataaaggaaagaggtttaatgactcacagttcagcatggttagggaggcctcaggaaacttacaatcatggcagaaggcaaaggggaagcaagacacctccttcacaaggcagcaggaagaagtgcagagcccaagaggaagagcgccttataaaaccatcaggtctcgtgagaactcactcactatcacgagaacagcatggggaagctgccctcatgattcaattacctccacctggtctctcctgtgacacatggggatataaggattataattcaagatgagacttgggtggggacacaaatcctaaccatatcaagtgctctgtggtcccagataagccaagaaaccttcgtggaggaggccacccccacccttggcctccagacccagtgggatgcctaggtaaggatggaagtgtcccttaagagggctggcatggatgtcacatgttccatggcacaccttgagggtaggcagccttgagcagtgggcggggagctgggcctgcagggacacagagccctgaggtcttgtccttggacccctgatctgggatcctcaggggctctgggagaaagcccctgtcccctgctggtgctggtggtgtggtacagataacctggaaaccctaaaagaagcagggatggagggaaggttgctgagaggtggtcagagaagctgttatgcagactgggggccagggaggtacaaggggagtccagatgggggctgtgggagggacagacagacagcagactgggtcacccccaggctccccttctgggccccccaggaaacgaataggtccagcccaaaaggggctctgggaagactgctcccagcacctctgtgctgccagccctaaaggcacccacccgacccccacacacgctgaatctccactccttgtttgcaggaggaaactgaggcccaggagcctggagatgtgtctgctccaggtcacactgtgggctgtaggggtccggaacccagacatgtggactgcgccaggctctagccaatgactcctccaaaccactgcacctccccagccctccagagttctcatctgaaaaacggggcatcaggtctgaaggtcttcaatgccccttctggctgggatatcagagttttgggacctctctctccaggtcctcatgagtccagcaggagctctggcaggtccagggtcccctccttccctctgctgccactgctcagcacccaaccctttttaaaattagctctgtgagttacagaagtaatccctgctttcttgttaacatgtttcaaacagcacagaagggttcaaggtggaagctgaaggtactccccagtctcccccacaacccccagcccacctctgctaggtcccacatggcctttgggaaacatatgcattgttccctcttcccatagaagccagaagggaagtctggaatcagtgagccaggtacagctctgggcccaggcccagagatcccacactcatgccagcccctacccacgccagccccctccctgtgccagccaccgcccctccatctatgcaggccccctaccaccaagcccatcgataggggctcattattccgtcctgtctccctaggatggggcagagtgacagctgttccgtgtttaattaccgatgggctgaggctatgccaacccatgaataaaattacagttgttctgcaatgcaaatattgcgggcctccgtctgagggtgcgtgcggggctgatcttcattggctgacttttttaatgaaaaaagttttattacattttaaagaacattcataatgatgaaattcacacacctcaagatttatacagcactgcaaacaagtggcaggagaaagggagttatttataacttcaaataggcttctatcctctggttgcattgttgtagggtgcagagcatttttagctgataattgctttaatggtaaatgagaaacttagaaccaaatatcggaagtgcctaaacaaggagaagcctcagctaagatgggggcgagttgaccttatgggtggggagggagaaaagggagctcgctctcgccaaggctcatggggtaagaacacatggcagacgttcagcactggcagaggtttgccatctgcgggtgcccactgggcacaggttcagcttatggagaatgaacttggagacatgacatcctcctgtcggagccgcaaccgcagggctttctcctcccatggtcgctgtgggatttcgttctgtgtggtgtatccatgctttgtgtgactggaaatctcatctgagcacagctggataggtgataatgcaaactttcgattccatcatctaaatccataccgataggaatacagaacatctgatttgatttccccttgtactaagaaaacggagcttcccagggaaggtgggcatttcctgctgaatgggactggaggtggcatttcctttgctaagccttccctgcagatccttccctctggggacgcagctgagctcaagaacagtatagctgagagaagcttctccagctggccctggtccccatctctaaacagaacagaacctgcttcaacttagcaccgtcaacacattcattcgttcattcattttgccgacatgtgtttgttgaaagcttactacaagccaggctcctggcacgttcggatgaggaggatgtagtctgtggcctccaaaagcaactgaacaggcaagacctatacgcagagacaactgagcctcactaaacatcagtgtgacaaggacagtaatggaggtataaatgcccagggacagggacagcagagaagagggcctggctgtgtctgggggtggagaggtcagagaaggggccatgcaagccagccttgaaggatgtagaggagtttggagtgggcacatgcttggcagggcagcagagtgaccatcaaaggcaccctccagcttgaggtctgtgggagggagggggactttgagtgtctggagcacggggtggcgtctatgttggggtgcaattgggatgtggtggagtgtcaggcggaggagcctgaccttcttcctggggcatctctgctgcttggagctggggttcaggggctctggaggccgcacggaatgcttatagatggtgggggcagggagggcgtttgggatagggattgggccagccagtaggcacatgagacagttagaaggagaaatcagtgactcctgcttcccttctcttggaggtcagccaagcctgggtgtctcctgttcattcagcaaaatacctcatcccggaacaagcgtgcaaaaggagacagggcaggattccaaaccagctgcaaggctccctctcggtgtccttccccacttcggcatgtctgtgcgtgcatgctggcttctgtgcatgcatgctggcttctgtgcatgggtttacatgtatgtatgtctctgtatatgtttgtgtgtgtgtacttagtgtgcgctttcatgtgtgttcatgcctgtgcgtgcatgctggcttctgtgcatggatttacatgtgtgtatatctctgtatatgtttgtgtacttcagtgtgtgtgtgcctgtgcatgcttgtgtctgtgctgagtgtacatgtgtctgtttatgtttgtgtatgtgcagatatgtgtgatgtgctcatatctgtgtgagcgtgtgtacatgtccatgtatgtatgtcaagcacaagggtgtgtgcttgtgtgaatgtgcactgatgtatgtgtttaaggatttgtgtgtgtttgtgtttatggatgtttgtgtgtgtgtgagggtgcatgcttattaggggatctgtgcctagaccagatacctgggttttttttgttttattgttttgtttttgagatacagtctcactattgtcacccaggctggagttcaatggtgcaatcatggctcactgcagtctctaactcctgggctcaagcgatcctcccacctcagcctcctgagtagctgagactacagacgtgaactaccatatctggctaatttttaaacttttcatagagaaaggggtctcattatgttgcccaggctggtctcaaactcctggcctcaagcaatcctcccacctcggcctcccaaagtgctggaattacatacaggagtgagccactgcacccagcccagacactgagatttttaaaattagtctgacactctggaacccacacagcctgacaccaccactggagattctaaagtgaatcccgtacaagccacgcacacagcccctgcccttgggtggctcgggtccctgaggtctccttggtgaggggaagaaaacggaagcctaaataacagcagctgccttatggagcagcccaggccaggctcagggggtgtgggggtaagaggatgtctaaggacagccaggctggtcctctgctcacccggagccagaagtgaggtagtgccagccaggcccggggcagcctcaggggccccgaagatgggaagggtgcccagatgcccgtggtatctgggagtgcacatgagtgtgtgtgtacatatatgtgagtgtgcaggtgtgtatatctgtgtcagtgtgaataaacacatctgtgtgtgtatttgtgtgcagataggtatgttggtgtctgtatatgtgcacatgtgactgtgtttcctgacccaggaacaactatctcttgaccaaagttaaccaaagtctcatagaagaggtggggatggggcagggaggacaaggcagacatcccactcctgtccttccccacagtagccctctgacctgccagcgtcagagccattaggaaacaagccatcctaatggctcgagacagtggccagtgggcatcgcgtatactccagggcactctgtgggacgggagttcattgttggcactggaggcctgttttattttttcttttcttttttttttttgaaacagggtctcgctatgttgcccaagctggggtgctgtggcacgatcatggctcactgcagtcttgacctcccaggctgaagaaatcctcccaccttagcctccctggtacctgggactacaggtgcacgtgccaccatgcccagctaatttttatatttttttaagagatggggttttgccatgttgcccaagctagtcttcggcttctgggctcaagcaatccaactgtctcagcctcccaaagtgcagagattacaagtgtgagctgccaagtccagccctgttcccttcttaatggcttacttggggtttcaatgatgacagggtcattactgggtttcaggaaccttccttaagcagctgaaagaatccgttgagctctgcttcctcttccctcttccaggctgaaggagctggaggggcctggggcctcctttggggaggccaggaggatttggtgattaagtgaatggaatatgcccattgtggtaaaaatagcagagctgcggttggtggaggcacagaagcccggccgaagggaccaaggggtgttcgggagggaggaagtccagttctgatgatttattaaggtgtacaaaagaaccttcagaacaaagacccagagatgcaggaaatgttgtccatttttctgcttaggttcaacgacatatggacagccatgtcgaaacagattggacaataagggctgatagactgaatggcaaaacccagccaggcctgtctatctagattcttcttggcctctctaagcagcgttcctttcttctgggtaggcggcaaggccccttctggaatggcgggggtgggggggggggtctcgtgacttacagtcaaacaaggtaggtcagagattgtgcaggtttgttacacaggtatacatgtgccatggtggtttgctgcacttatcaacctgtcatctaggttttaagccctgcttgcattaggtatttgtcctaatgctctctccctccccttgccccccaacccctagacaggacctggtgtgtgttgttcccctccctgtgtctatgtgttctcgttgtgcagctcccacttacgagtgagaacatgcggtgtttggttttctgttcctgtgttagtttgctgaggatgatggtttccagcttcatccatgtccctgcaaaggacataaactcattcttttttatggctgcatcgtattccatggtgtatatgtgccacattttctttatccagcctatcattgatgggcatttgggttggttccacgtctttgctattgtaaatagtgctgcaaaaaacatatgttgtgcatatgtctttataatagaatgatttataatcctttggatatatacccattaatggaattgctggatcaaatggtatttctggttctagatccttgagaaattgtcacactgtcttccactatggttgaactaatttacactcccaccgacaatgtaaaagcattcctgtttctccacagtctcaccagaatctattgtttcctgactttttaataatcaccattctgactggcggttttgatttgcatctctgtaatgatcggctaacaaacatatgaaaaaaagctcatgatcactgatcattagagaatttctttatggccagtttttacacagaaaggcagagggaaagttagagttatatttttaggttttatggctggctttgggggaagagcttcagattctatgaccagccttggggaagagggattctagtttttatggttagcctcaggcaagaatgggactgagagacaggagggcaggagaaggtcagagaaaaacttttgttttggaggctgtttctggggccctcattttggaccgcagcaatagctgggccagagggagagtggcgggggctcagtggtcggactcagagctggcttgtccacctgcagagctcttctccccatagatgccccctacccaggagggcgttgtgagtccatttcacaggccaggaaactgaaactcagagaggttgtgcagctgcctgtggccactcagcaggcaaagccagagctgttgcttgcaccaaggccacctaagcccaaggtgccgcctgccccatgcagctctcctctcctgccactcagcagggaactccagagtccagagatggggaccatccctggggcaggcactgggcagccgcgatgctggaaaatgctcaaggtttcctttcatcacagcccaggccacagcgcctcatttgccaactgtgttctgagaaaacagcaacgatagaaaggcaccagtgaggaggcggctggagctctgggctgtgaggctgcgtttcaggattgagaggctgcgctgggaagaagggcctgccttgggggctgaaggcaaatcctaactcctactgcatgtgatataaagggttacaaaattaagtataaatgcatctctctaaagtcacttttctttctgtgtgtgtatatacgaatatttgtatttatttattattcctaaaaaataattgtatttactgttgtttattgtgttgtatttattattccttgcgttttattgtattgcattttattatttatctattgtgtttattatctattgtatttattattgtatctattatatttattattcctgaaagtttgtacttattatttatatattgtatttattgtttattattgtatttagtatttattattgcattatatttattattatttattgtatttattatttctaaagagtttttaggaaactctgtatttattattcctaagataaagtttattgtatttattattcctaaatatttatacatttataatatttatatattatatattcacatatttgtaatatttatgttagttacattacatataatatttatattatatattacgtatgtataatatgtatattatatatttacatatttataatatgtatattatatatttacatatttatacaatttatatattatgtatttatatattgtatatttatatatttataatatgtaaatatttttatattatatttaggaacaataacattgcacttattattcctgaaaaagtctggggcaagattaatttgataggataaacacaagtactacaatgctgtttttttggcaccccagaactggtaggctgatccaccaatattctttagtcaaagttcttagggccttgaactggaggtaagaggataagcccaaccttaagtctcttgtattttagagcttgccatatatattgctgtgaatacgcaatatgatttaaccatagcatagcaatttaaccaaggaggttgagttgtagcaggaataagagtaataacttttgggccaagcacggtggttcacgcctgtaatcccagcactttgggaggccaaggcgggcagatcacgaggtcaggagttcgagaacagcctggccaacatggcaaaaccccatctctactaaacatacaaaaattcgccgggtatggtggtgggtgtctataatcccagctactcaggaggctgaggcaagagaatcgcttgaaccctggaggcggaggttgcggtgagccgagattgtaccattgcactctagcctgggtgacaagagcaagactgtctcaaaaagaaagaaaggaaaaaaaaaaagaataataacttttggtagagtaaataatgcctaaacctcacttattgatctcctccatgggtcaggcaccccaaggccctcacaagtcttggttgtcttaattaatttaagccacagaacttgaggttggccctgtgatcttctccatgtttagaagaagcagctgagctttctctccaaattccctagagacatgccatcacccttacatgcatacgaaatacttttgtcccttatgaaaatttcactaggaaaaattactcactacgttccttagtcatagatgtgtatgtaaaatgcatttgcggggccagtggtaactgacatagcctgtaacttaccaggtgtgagatgtataaatgaagatggccattgtctgaagtgagaagaatgggataaaaaaaagaaaacaaaaatcggagaagtcctactgaaactcagtgaaagcgtcagctacattttgcaaacttcaaggagtttctgtcaggtgctaggctgctgagaccagagtgaatttttggcttaaagcagacatacagccctctctccaggggaggcagcatggtgtgggaaagaaagtcaaggacacgctagtggaaagtcatgtcctcctctccagggtgagcatgcaggggcggcagccgttggggagatggggccagtgcctgccttgtcttaagggcctgcagacaccccagcttcagatacatgggcacagtcttggctgcacctagaagccctgggatgctgacgtgagcatttcctgggatggaggaactccttcttgaaccccctcaaacttgcagaggtgggctagacatgagtaggctgctcatgagcaccttttgtgtccgggaaccagcagtcatgaggatgctttgttgaccgtgaagacccagtgtttccagcaggcagaattctgtggcctggcctcttctccaatggccccttcaccactgtagtgagctccatctgcccttggggcccccttcctgaacaagagagatgcagctcactcacacagtgggatggggatgccctcaacttgacaggcaaaagcctgggcatgagagtgagctcagctatccagccccctgaagaaaagacagatggagcagaaaaccgtattgtcatgatatcaaggaaagagaaaaaacagaattctaaaaatatttactccaggaaacagatgtaaggttttctttccaaaatgaaaacattgaatctgcaaaccaaatggggaagagaggatgaggacaagctgtggtggaaatggagctggtagtcaggtaaagcatccaaggacacaaacatcacagcaaaatcgcagaagggtcagcgacagggagaatctgtgagaaccctgcagacagtggactcggtgacatggagcataggtttgagaggctttttcagagtgcaccaaaaacaaaacaaaacaaaacaaaacaaacgaacaaaaaaaggaccagagaagttagaagcaataatcggcagagcagcggctttgaagaaaagagattggaaatccaatcaggaggatgggtgttaatgaagaaagaacatgactaacaaggaagaaaaaatattcaaaaataaaagaggaaaacctggctgaactgaagacagatctaaatctgcaggttgaaagggtttgctagagaccaggcaaaactagtaaacatcaaaagatagtggtgacacactaatcgcttggattcatgaggaatgaatacctacaaagacataaacagcaggctgccttggttctctccctgcactccttaccgcctgccctccttggagtagggcctcaccctgccttctcagcatctcttttctttcctttccttttcttttttccttccttccttccttccttccttccttccttccttcctccctccctccctccctcccttccttccttccttcctccctccctccctcccttccttcctttcttccttccttcctctcccccctttctctctctctctttctctctctctcccttcttttctgacagagtcttgctctatcgcccaggctggagagcagtggtgcagtctcggctcactgtgcaacctctgcctcccaggttcaagtgatgctcctgcctcagcctcccgagtatctgggattacgggtgcctgccaccacacctggctaatttttgtatttttagtagagatggggttttgccatgttggccaggctggtctgaactcctgacctcaggtgatctgcccgcttggcctcccaaagtgctgggattacaggcgtgagccactgcgcctggcctctcagcatctatttctctgccttcttgatcacccctccctgcgcctcagtccatcatgggggaatcccaggtgagatgcacttgtactcctagcgttacaggaaagggatcccaatccagaccccaggagagggttcttggatctcgctcaagaaataattcaggacaagtctgtagagtaaagtgaaagcaagtttattaagaaagtaaaggaataaggaatggctactccatagacagagcagccccgagggcagctggttgcccattgtcatggttatttcctgatgttacgctaaacaaaggtggattcatgcctcccctttttagaccataaagggtaacttcctgatgttgccatggcatttgtaaactgtcatggcgctggtgggagtgtagcagtgaggacgaccagaggtcactctcgcctccatcttgattttggtgggttttggcccacttctttactggaaactgttttatcagcaaggtctttatgacctgtattttgtgctgacctcctatctcatcctgtgacttaaaatgccttaactgtttggcaatgcagcccagtagttctcagcctcattttacccagctcctattcaagatggagttgctcttgttcacacgcctctgacactagtcgtctcactgcagagctgctgagctgccttggatactgggctaatcttcagagaccagaagctggcaaggctcacaatatgagccttggctgctcacaccttcccccaagggaatccctatgtgcagatggggtttggataggcagaggggagagacccctccttctgcaaattcaggccaaagatgggtcaagccctgaagagcagaagccacataacttttgggccacactgtagacccagtgggtgaactgcttttctcagccagcaggtccactggggctcacccaggctaagctagatgccccctggcaaggttgccaactccctgacctctacctaacgacccagggaggggaatggcttgccagcccatcactcctgcagcaactgtggtgggaaggatgagaaacgtaattaaaatctcaggcatcttttcccaagggtcattccagctgaagagcctaaatatcataagggtatgaatgagctgcatttattattttcaccatggagacgtccaagaaaactgaccttttcagcttcaataaaaacggattttcctgcagatactttgacaacagctgtgatcatgagcttggctgaaacttaatattaaacaccaaagaccaggaaaaagagatgccttcccaaggcctgggagagttactgacacccgcttgcaattagacactggtatgggcatggcagcctgagcccagctcacagaggctcactcactcctctctggatccagatggctgaggaacccactcagcatcaaagccacctattatttacgcgtttagtttaaggcatgtagcacgggactcagagcaaagctgcagtagcagactgccctggaattcagcaggactaggttccggtctgcttggattcagcatcccctcctgtcatgtgaccaggagccccagacatcacactctggctcgtcttcccctaaacacagcccagagctgaccctcctgccatgacttggccatactagttggcaaaaagcttgccaacttcctgccccaccatttctactgaccatggtagccaatacccagaggaacagatgacagtcaatggcagctgctgccttgcactgaaatcaggtgttggacagtaacaaaaccttgagttccctctaaacacctgtgcctgaccccaggcattttgtcctccctgtcccaaccctgctgaaaccacctttgccaaaattatgactgagaaaattattacagtaaaagagatctgactgaaccaactccgtcttgctcctaacctccaagttgtccttgttcattcctgggcataggccgaactaactttgggaggaacttggtttacagtttaattttgaaacaaagatgataacagccttttcccaaaacaaacccccttcttgcttggggactagactgcctttgcaggactaaaaaattagccacataagattagaaattatggtgtaggagtcactgttgcaaaatctgagattggtgcttttgcagatcttctgctccagtgcaccagctgatgccacccaaatcgataaactggctcatctggtcttggggccccccacccaggagctgactcagtgcaagaggacagcctcacctcccgatgatttcatcttcaacccaaccaatcagcacttaccactttccaaccttctacccaccaagttacccttaaaaacccttgtcccccaatttctgaggagattgatttgagtaacaactctgtctcctgtgtggcgtggctggcctcttgtcagttaaactctttctttactgcaatgctgtggtctttatttgtgcagtgggcatgaagaatctctcaggtgggtacactgccaccatgaaagtgaagcaatttaaaaaggtataaaacaataaggacaaaggcaaatgaggagagagtagcaacgagagatttcaatgaatttcagaaggcagaacttggaggaaggcaatcttactaggcagagcagagaaagcacctgaggtgctttagaggagactggtgagcatgagcctgtcagagatgtttgaaccacagcaactccatcttgaatagaggctggataaaatgaggctgagacctactgggctgcattcccagattgttaaggcattctaagtcacaggatgaaataggaggtcagcacaagatacaggttataaagaccttgctgacaaaacaggttgcagtgaagaaacccaccaaaaccaagatggagacgagagtgacctctggttgtccccactgctacaatcccacaagcagcatgacagtttacaaatgccatggcaacgtctggaagttaccctctatggtccagaaaggggaggcatgaataatccacccctcgttcagcatatcatcaggaaataaccataaaaatgggcaaccagcagcccttggggctgctctatctatggagtagccattcttttattcctttactttcttaataaacttgctttcactttacagactcatcctgagttctttcttgcacaagatccaagaatcccccctctcttggagtctgaatccaaacccctttcctgtaacatgcccattaacacagaacctcaggcaagtggtggggatggattccggaagctgggactgggaatgagagtttaggaggattaaaaacaagggagttggatgacgtcacagaagagtgcagttagaagctgcaggaatctttccctccaccctaacaagttttgatctggcaagggctgtctaaagcaactattttggaactctgcagtctagttgaacacgttcggcatccaagagaaaacttaatggagaagctggtgaattttaatacatttccatgtttgcgtactggctaccatcccccacctgccagccccgtggcaaacagctgtggggacagtggcctgcattcctggtgtgacttgctggtgccagggtggggaataagaaccttatcctccaaaaattagagttgtgtgttttgattgctgatccttttgacctctgggggactggcacagagtccagccattgtttcagatcacaagagctagagcagcttttctgctgtgaggggatttaaagagacatgacttccctgttccctcccctcacctcaacaattttgggagccaaacatttaaggaaatctttgtcaggtcattgactgacagagacaacggaacaggaacttcaaggaccacatgcaataagcaatcacaatttgtaaaaataatctggaaaaaaatcacagatggatggctccatccttaacaagcaaaaatccacaatccttgaggagtgtgagagttagagttccaggattaccacaataataatcagaatgcccagtactcaacaaaaaaagtacaaaacatacaaggaaataggaaagtatgacctgttcacaggaaaagaacatttgacagaaaccatccccgaagaagaccagacataggaattactagtcaaagacattaaatcaattatcttagacacatttaatgagctaaaagaaaccatggattaaaaaaccaaaggaaattgagaaaataatgtctaaaaaatgagaatatcaataatgagaaattataagaaaggaaccaaactggtcttggaactgaaaaatacaataacttaaaatgaaaaacttactggaagcattctacagcagatttgagtaggcagaagaaaggatcggcaaacatgaagataagacaattgaaagtatccagtctgaggaacataaataaaaatgaatgaaggaaaataaatagagcctgaaggatttatgggatgtcatcaactataactatgcattataggaattacagaagaaggaagagaaaggggcagaaaaacatatttaaagaaattgtggctaaaggcttcccaaatctgatgaaagatatgatatagatactcaagaagctcaacaaactccaaacaggataaactcaagagatccatactgagacatattatactcaaattgccgaaaccaaagcaaagagagaattttgaaagcaacaagggagaagcaattcatcacgtacaaggtatcatcaaaaacttaatagctgatttctctttagaaaccctgaaggctaaaaggcagtggggtcacatatgaaagtcctggaaaaaaaactcaatcaaaaattcaacatctggcaaaactattttttaagaatgagggagaaattaagacatttcaagaaaaacaaaagctgagggagatcattacaaatagacctgccctagaaatgctaacaggctggatacacacacacacacacacacacacacacacacacacacaagacagtaacttgaagctgtaagatgaaataacactaacactggtaaaggtaactacatagataaatataaaagccaatattatttttccttggtttgtaacttcctttggtttggattggttttggtttatacttttggtttggtttgtaacttctccctttttcctacctgatttaagaaactaatgtatacaacaataattgtaagtctatgttaatgggcacataaggtataaaatgtaatctgtgacaataataatgtaaagaggagggatgaagatgtataggaacagagtatttatattctattgaaactattatccaaatttaattgttataagtttaagatgttatttgtaatctccaaggtaaccactaagagaataacctaaacacatatagaaaaggaaagaaaaatggaatcaaaatgatacactacaaaacaaatcaactaaatttttaaaaaggcagcaatgggggaattatacaacaaaaatcatgtaagacatacagaaaacaaatagctaaatggcagaagtaaatccttctttatctagaatatataaaaactcctgcaaatggacaatacaacaacgaaaatccccaaacaactcaattttaaaaatgggcaaagaatttgaatagaagtctctccaaaaaagatatacaaatagccaatacaagatgattggctaatatcattagttatatggttcagcgtccaagagtccaatatgctcaatatcattagtcattggagaaacgcaaatcaagaccacaatgagatatcacctaacaccaattagaatagctataatttacaaaaaagaaaaaaaagtttaaaagcacaccagaaaataacaagtgttgatgaggatgtagagaaattgaaaaacttgtgcatggctagtgggaatgtaaaatggtgatgccccagtggaaaacagtttggtggctcttcaaaaagttgaacatagaattattatgtgatccagcaattctgttcctaggtatatatccaagatattgaaaaacagggatgaaaatagatacttgtacacccataagcagagtgtcactggtgaagggtgttcaggttcttggcattttgaacaaagaattggacaaaatgcagaaacaaagcaaggaaagaatgaagcaatgaaagcagagatttattgaaataaaagtacactccatagagtgggagcaggcttgagcaagcagttcaagagcccccttgcagaattttctggggtttaaataccctctagagattttttttattggttacttggtttacaccctatgtaaataaagtagtggtttgcaaccagtctaattggttgcagaaggtggccaaccagaagccgaagtgaagttacaaagttacagatgaagacttggtctgtgaccagtctgattggttgcaagaggggaccaatcagaggtactttcgtctttcatctgcaatgcagaaaaggggttgggagttgcaaagggagtagccactgatccttttgttacttaaaggtagggttttcctcttgattcagttctaggaagtcagcatggatcagcctaaggttctctgcctccagactctattctcctgcctcaatagctgcatttttcaaaatagccaaaaaggtgtaaacaacccaagtgtccattaatggatgaatacattttaaaaaatgtgagatatatatatacctgcaatggagtgttattcagccccaagatgtactgaaattctgacccatgctacaacatggaaaaaccttgaaaacactatgctaaggaaaagaagccagacataaaagggaaaacattgtataattccacttgtatgaagtatctagaatggccaaataaatacagacagaaagtagaatagaggttcccaggggctggggcaggaaggtatggggtgttatttcttaataggtacagagtttctgttttggatgatgaaaaatttctggaagtagatagtggtaatggttacaaaacattgtgaatgtacatactgccactgaattgtacacctaaaaagggttaaaattggcaaattttatgttacatatattttaccaaaaaatttcaaaaccagaggaattggtgaaaaagctgtaaattgagcttctgaaatgccagagtctctctccttgctcaatatccaggagatgagaggctggagtttcattttattaggaaattgaaccaaggagttgaattttagggcatcaggcataagagatgtctggggaacagtgtggattgctaggcctccttcactcaccagatatggcatttccccagtcacataccacccacccaccaccaccaacccccacacacaccacagcacattccacacaccatgcaaacacactccatgttcctggctagaatatcagcaggttctttctggaataactgggctgtcactgagagaagaaccccacacattgcatatgtagtctgtccagtaaaaagaccagcctgttgcttgctcagcctcccaggagtcccgaaagagaagaaatgtagaaggctcagtctgcctggtcaacagcagtccacaaaagacaacagaaaaaacaaatgggaggaaattgtaaaaatactataaggcagtttcccatggttgagggacataattctcttcagttaaaaagcccaccaattgtccagcacaagaaatgaagtaagtttacttcagggttcatcaaggtcaatttttaagtgacagagataggaagaactaaatgttttcaatgagaaaaaaagtatagagcctgtgatgtgcccctctgataccccttcaggaaaacatgtgttgtcccagatgtcagcaggtggcttccagatctcagcccttcaggggtctctacgtgttacagagaggcacctcgccccaggtcatgcctaggtgatccatatccgatggctgttagatgttggagcataaaagtgaggatatctttgttcagttcaggaccctctgaaaagttattcctgctccagagctcccctggggtcaaggaaggctatctcaagcctgaagtgcagtacaacttctccttctgcctaaacctgcctcctttctctctcttttataaatgttaaccacaggagaatctttagtaaacatcctgcatgctaagtctgcttccaagggagcccagcctgcaacagatgtcatacacagaactgggaattagaatggcatctgactcctcaacaacaacactaaaaactagaacacaatggagcaatgcttttaaaattctgagggaaaaatattttcaagctaaaattctatacccagctaaactatcaatcaagaatcagcgcagaataaaggcattttcagaccttcaagtactaaaaatatttactttccaaatccatttcttagggagctgaagaacagggatctgaagaacaagctccaggaaaatgagaaagaacaaaaaatggtgtcatgagaccaggaaaaagaagatcccacacaggagaaaagcgaagcctgctcataaggtggaagcttcacagcagattgcagcaagaggtagaaggttccaggagggaaatcctcaggagtgaaacagagctaatgggttagagcagaagcccccaatttttcttggtccatgacttccttgatgtcttagtaattttttgtagagatggggtctcactacaaaatgttgcccaggctggtcttgaactcctggcctcaagcaatcctcccaccttggcctcccaaagtgctgggattacaggcatgagccattgtgcctggctacttgtttttattttttgtagtgacgggatctcgttatgttgcccaggctggcctcaaactcctggcctcaagtgatcttcccacctcagcttcccaaagcgctgggattacaggcatgagccaccacacctggcctgatggtttagtaatttttgtattgctgtcttcaggctaaaagaaatatctaacagttctgtttattaaatagttagatccaaacaatttaataaatatttatgccctaacagcttagtagccattaaaaaaatattatgcataaatggaaagaaaaataatatttttatttttattttattcttacataaccacaattacttcctgatgggatgtgtctgccttttggacactgcagtttctcaaacctttgcatcaaattgtgcacctgtagcttcattttctgcttcactatgacatttgcccaatactcacttgttatcatagtaactgctgaaacccaactttgcaaagatatagcattattgtaagaaatgtagttcaggggccaggcgcagtggctcacacctataattccagcactttgggaggcaaaggcagatggatcgcttgagcccaggagtttgagaccagcctgggcaatatggtgaaaccccatctctacaaaatacaaaaaacaaaacaaacaaacaaacaaaaaaacacaaagccgggcatggttgtgtgcctttagccccagctgctcgagaggctaagatgggatctcttgagcctagggaagtcaaggctgcagtgagccatgatggtaccactgcactccagcctgggtgacagagggagaccttgtatgaaaaaggagaaaaaaaaaaagagctgtagttcactctaacattagaacagttaactaatagtttgtgatacctaacaaatattgactatcatttggaaaattcaaaagatcctatggtacatctgtgctatgcagtgaatgaactatgatatcctggaactgacttggtacattttgggaattgtgatattagagtatgtcaaaatatagttaatagacttttggctgacattttgaaacatatggaaaaaactaatgataggtatatggaaaaccagacaaataggctgggcgcagtggctcatgcctttaatcccagtgctttgggaggccaaggcaggaggatcacttgagcccaggagttcaagaccaacctgggcaatatagtgagattccatctctacaaaaaattttaaaattgcctgggtgtggtggtgcccgcctatagccccagctacttgggaggctgaggtgggaggattgcttgaccctgggaggtctaggctgcagtgacctgatcgtcactgcatttcagcctcagcagcagagcgagaccttgtctctgaaacacacacacaaaaaatgaaaaccaggctataaaaaagtgaagcaattattgactctagaaacaaggttggacaaaaaatgagacgagatgatatacttcttgacttaacaataaacaatatttgcatgatcataataacatgaacactgaccacagttttaaccaagagtgtgctggggttggtagacaaaagtaaaaacaagctagaaacttgttcacactgtggaacagcaacatagaaaacgacaaaaccaaagaatgaagatagggccgtgtaaacgtgggatttggaaacacagaggcagataccaaggaagcagctataagaggtaaaagtgtcaccaggagaaagattggggtatagggaagtaaaactattgcccttattctaagtcttttggtaatatttgacttctcaaacaatgtgcatgcattgctttgataaccacatttaaaaattaagccaaacaatgttaaaacctaacaaatataacccggctgccccttctaatctacgtaatatttcacatgcaaccgaaagtctcagagctctcccgaggtttctgcaaacctgagcctgagagtggagggatgaattatattctcacagtgctgccagcccggctgatgcctctgtgggattcttgtcctctgcaaagtatggggcctctgtgatttactcatcacacttcacctgccctggcctctccaaatcagctaaaaagagacagctgaggcccaagaggttgggggcctctgcagaggggttccttattaggcacccctttttcttcacatcaggcttagactcccacctctgtctgaggcctctgattcctgtccctgtcccagagagaccctaggagtgacctgcatttactctcacagttggctccaggcctgacacctgcccccgcccccaccaccacacacacacacacacacacacacacacacacacggcaggagggacagcagcaggagcagagcaaatggcacactctcttagaagaacagcagagaccctcatctttccttcaccaggcttcatctttccagaaaagagtggtggatttaagtagcaatttccccctccattacatagtattaccccccaccccatattgacaagcacaggaatcacagtgactgtgcaccgtgaccgccacacagcagtctgaggatgtgatgaccacagagctccttcttggggactggcgtttcccatgctctgcatgtgtgtgtgtgtgtgtgtgtgtgtgtgcacatgcaatgtggccaggccgccatgtgtctcagcagaatggtaagacgagtgaataaggcattgatccctgtgagcccaaagaacgcacgtgttagtctcttagtagcaagcctgtgagcaactgttctcaggtgtcaggagttgtgcctcactcatccagaataactgagagaggactttgggtccctttacagcccccgaggagggtccctttcccaggcaggccaaggaccccagtttgaagaagcttgcctgccctgcaactttattctaaaccctcagacagcaggttctgcattcttccccatcttccctgcagcatttaccaccgcctgagggaggggggtatcctgagcctactccctctttgtggggtgacacctgtctgcacagatattccagggggaggctacctgatggcgaccctctgaccctcaagctggctggtgtgaggatgaagctgcaggtctcgcttctcctctggggagagctggctgggctccccacgatggggcagcttgcagggaaaggggctcagtgcacctggccacccccttgcctatgggctgcatgttgaagatgtatattgaagctgcataaatggcttgtatttaagtaatccttttgactctgccctgggagtggggctgcaaagaggaggttgtggaaagtgcaagggaaaggtccagacctccagcaatggcaatgaagggcgcattctgggtcgagcatgccccagggggctactccctgtaactgctggcccggccccatggcctcagcaccccaggcccagtgtggacataatggcccttcctttagtgccccacaggacaatatccaggataatggaaggggacaaaagccagagcatcccagacacctaagactccttctctgggcctggtgggcatgggctgcagctcctcgggatcccatcctcaggaggtcccctctcaaggctctgccttcttcaaaacctgcctgacacccccaggcatgtgcaaccttctccacctgccccagttgctgaatgaggccctggcagtcactggaaatattcttcacttccagtaagacttccccaccatgctccacctcaccaagaccccttctagaaaacccggctgctacaggccctgaaaaggggagccaggagtgattgagggtggaacgccaagtgtcactacatccgaaattcagatagtcctcctgcagcaagtcaacttgcagacgtcatcaggaacccagcccagccaggtgcagtggctcatgcctgtaatcccagctcttggggaggctgaggcgggaggattgcttgaggtcaggaatttaagaccatcctgggcaacatagtgaaacccccatctctacaataaaataaaataaaataaaattaaattaaaatcagctatgtgtaatggtgtgcatctgtagcccagctacttgacaggctaaggagggaggatcgcttaagcacagaaggtcgaggctgcagtgagctacaacggcactactgcaccccagccttggtgacagagcaagacactatctctaaaaaagtaataataggtagggtatggtggctcatacctgtaatcccagaactttgggaggccgaggcaggtggatcacttgaggccaggagctcaagaccagcctggccaacatggtgaagccctgtctctattaaaaatacaaaaattagcagggcatggtggtgggcgcctataatccagctattcgggaggctgaggcaggagaatcacttgaacccaggagatggaggctgcagtgagctgagattgtgccactgtactccagcctggacaacagagcgagactctgtctcaaaaaaaaaaaagtaataataataaaattttaaaatacaaaagaaaccaggggcatgtggctggtgtccagtctttcctgttctcccaccggaggcgggaccgggctctggacatgcctgagctggtttactgattgctctcctgagctgcatgcaatgggctattctcatcctcttcccagaaaaccccctcccttgactcccaagtccatgcccctctccacccccttgtgcttgggacctgagcttgaactccaaatgcagcagctatgactgcttaagcaggtcctcccgaggagcagggctgctgggggcacacacactgtcctgaggacatgctctgcagccattgaaactgttagtgtctgccagtcaggaaactctcaccttctgcaaggcagtctggctctccatggcctccgagtcaccgcagccctggatcaataccagtgtaaacagagcttcgctgtgagttgttagttgtctttcctggtctggggcgtaattcatactgttggctcctggcacctggctcgccaggggctggcaggggtgctggggagaggggtgtgtggtcagggtgagagcacagtgccctggagggcagttccgggagaacagtgaggacatctccaacaaggggctgggggacaaacacaccctctcccgcagcacaggggactggactctccccagatctcctgtgcagctgagctgcccacatgtctctgtctgtccagcttgctgaggacaatgtgttaagaaccgtctgctcagctcataaagaggcttggcccttccgccccggctctggttgggggtgtttcagggaaacaggctttccagggatgcttcggcatggccgtgccgtatcctggcaaccagacccaaagccacatcctcttgagaggactgggcagggtggggaagtggccactgcgtggggctacccccattgtccactccacccttagctggctctatgcataccctgagctgtgcaggagtcacagctctccctgagtgccacaccctgtcccaagatggcctgcagggcattcagaggtgctattttccaccatggtctccctgggctcctgggaaactccttggccataacctcagttttctcatctgcaaagtgaggtgggctgggagccaccactccctacgataatcccagtgctttgagaagcggaggtggttggatggcttcaggctaggagttcaagaccagcctgggcaacatagccagaccctgtcttaaacaaacaaacaaacaaacaaacaaacaaaacttaaatgggtgtggatgatactgtctttcacagacccagcgctccccagctgcccatgcacctctgccactcctccttcctggataattgatttcaaagcaatggcagttgaggtgactgggctggggtctgtgccgtgcagccctctagacacaaactccctgcccttgaggcacctccttatctccaagcccagccaggtctagtcatcctgggctcctcgctctgtttccccttatccaggagctagaaaaagactcgtggcatactccccgccacccatagcctgctcaatccacagaggtacagatgatccaccaaagtccgcctcattcaggcctgctgactaccttgtcaaaccacatctcctcctacagcagaactgtggggagacaggccccaggctggagtgccccccagccagggcctcaccttcaacctttaatgctccccttgccaggtttctgaacatatctgcaatgacctgaatgtgtctcccaaaaagcaaaatgttggaaacttgatcctcaatctaagtgttgagaggtgaggcccaaagagaggtgataaggccatgatggcagagtcaaaggactaacactgttatcgaagaagtgggtttgtcacacagggggaatctggccctctcttactctcactgtctccccctctcaccctctctttgccctttagccatattgtgaagcagcaagaaggctcttatgagatgctgaccttgttgatcttgaacttcccagccttcagaaccacgaaccaataaattcctgttcattataaattacccagtctgtggtattctgttacagcaacacaaaatggactaagacagtcttctctgctgtctctcccataggcagttctgccagatcccccaaagcccaccaatcccctcaccccagggctccagaagaggttatgtcctctttggaggtggacccatcctgatggccttggacctgtggctccctgggcctcccatcagcccctctatttggagagtcactgcagccaggagccccaagaagggacttctcaattccccaatagtggacactgtgttgctccacccagatctcctctccaggggctgatgccactatgctggtcggggttctccaaggagacagagccaacagatagatagatgatgatagatagatgatagatagatagatagatagatagatagatagatagatagatagataaacacacatgagagagagagagagataacagaagtcaggcacagtggctcacacttataatcccagcactttggaaggccaaagtgggagaatcgtttgagcccaggttcaagaccagcctgggcaacacagtgagacccccatctctacaaaagatctgtatgtatgtacgtatgtatctattatctacatgagattttttaggggaattgtctcgtggttatggaggctgaggtttcccatcctcagccacctgccagctggagacccgggtatgttgggagtgtgactcactccaagtctgaaagcctcagaaccaggaaagctggtggtataactctcagtccgaggctgaaggtctgagaacctgggctgggggccactggtgcaagtcctacagttcaaagcctggagaacctggagttctgatgtctcagggcaggacagtagggatgtgtctgctccaggaaagagagtgaattcacctttcctctgccttttcgtgctatccaggcccccagccaattggtggtacccacccacattgagggcggatcttcccaactcagtccattgactcacataccagtctcctctggaaacaccctctcagacacaaccagaaataatgctctcccagccgtctaggtgtcccttaatccagacaagttgatgcctaaaattaaccatcatggccattatccccatgggagctgggaatatccctgccttcttccctgggaattcccttggcacccgggaagcacctttcctaagtttatgcctcctgtggggtgatcctgtatccagcgactggctgatgtgggagtacaaagccctgcccctcacctcagtttggggcaactctgaaggcgtgtccagctccagggctcccccaggcctggctgaggcctagctgtaactgcactggggggtcgccttccctctctgcccaccctcgccctccccgcttccctatagggggtctctcctgagagccatcagtgtaaacctcctgccccaaactctccacctcagctgcttccagagaactcagcctaagatgcctttgggctctggggccaggtggctgtgagcacagggggcacgggcttgcatcctcttggaattttcactgcaaactcagagtcctgactttcacaggtctggccgtctcatgggtctggccccataggccttccctagctcagcccttgggcagcagactccctttgtaatagacactgtggctcctcttcgatgccctgttccatactgggcacctctgccctggattccaccatctgtacctgccactcctcagaagatcacccagggttagggagctgccctgcccacaggtgcagagagtcttaagttcctggaagctgatgagagcctgggcagtgcttagtcaatgactgacaggtgcaggagtaggaaagcccagctccattgcctcaaggtgaggacagccggactttgcctgagatcccaatcttgattgacttcttactcttccctggcctgatcccccctacctttctagcatcagggactagtttcatggaagacaatttttccgtggatggtgggggaggggagatcagggatggattggggataagtctgtttcaccttagatcctcaggcattagttagattcttataagaagcatgcagcctagatccctcacatgcacagttcacaaaagagttcacactcctatgagaatctaatgccaccgctgatttgacaggaggcagagctcaggcaataatgttcactcacctgccactcacctcctgctgaggccatgaaccagtactagtccatggcctggggcttaagaacccctgctttataactcatttgcccatgaatgtcgatctcaggcttctctagggaaccccacccaagacacttctctcaacaagagaaaaaaatggagtccagacagcgccaacatatatacacacattcaagcctggggggcttgcatcttgtagtttgcatgtttatttcaggccgggaaggactttctcccacccaaggatccgccatgtgagaatcactcatccgcatttccttccattatttttgagagcttcatttgttatgattaaagctttaatccactattggaatttattttggtgcatggtgttgagaaggaaaccaatttaatatttttcataaaacagttaactaatgatcacagcaccatttatttatttatgtagtttttaaattaaaaatgaattagaacatgaaatgatctccaagatattattaagtaaaaggaaaaacaaagtgcaggatagtgtgtataataagctcttatttatttatttattaaatacataaaaggaggctgagcgcggtgactcatgcctgtaaccccagcactttaccaagggggaatattgcttgaacccaggagttcaagaccagcctgggcaacctagtgagactcccatctctaaaaaattaaaaattaaaaaaattaaggttgaccgggcacggtggctcacgcctgtaatcccagcactttgggaggccgaggtgggcggatctcaagatcaggagattgagactatcctggagaacatggtgaaaccctgtctctactaaaaatacaaaaaaacttagccaggcgtggtggcaggcacatgtagtcccagctactcgggaggctgaggcaggagaatggcgtgaacctggcaggtgaagcttgcagtgagccgagatcacgccactgcactccagcctgggcgacatagtgagactctgtctcaaaaaaaaaaaaaaaaaaaaattaaagttgtacatgtctgtagtcccagctactagggagactgagacaggagggttgattaagcctgggaactcgaggctgcagtgagccatgatcatgccactgcactcactccagcctgggtgacagagtgagaccctgtctcaaaacaaaacaaaataaaacatacatataaggccatctataggcatggacagtttctataaggttttgtagaaactgttgatagtggttgcctcccgatagagggccagggctctgaagtggaaaggagaactacttctcactgagtattctgtgatccatttgaattttttgtcatattcggtcattagctttttagtaaaatttaagcgaattttaaaaatttaagactctgtgggttgcaagtaacaaaatgtaactgaagctaacttgaacataaagggacacatgttttgaaggatgcagtgatcaccctggagccctaagccaggagggcagccagtgtggagatgcgtggaatgaaggatgctaataggataccccctcctgcctgtccagctgttcccaccctacatcagaggacttctctcccagcagaaagtgcctgaaacccacctgaccctgcccactctcgccaggcagggataaggttcgtcttcttagagcatacttcttttttagagaaagcaggccactccactctatctgcctgccttcctcgttgtgccacccataggctgaatgataatgaaatcttccccaacacaccccatggatggtagccaatttcatttagaagagagaacatgttaagagccttctagaatagaacttcaccctacttggttgccagtccaaagcagataccatttcttccttcctggagagaataaggcagtgatggttccagtgaattcttaccttccataattctttggtggcttgtttccatgaccagcagtcaccccagggtttgcttgtaatggggggaattccctatccagtgtcctgtggggacacccagaaaggagcaccgtgggggatcccctgaaagggctgacggccgtgatgatttactcccacttagagcctgaacacaaaactgtggctttcttgagggactgagaatcacaagccccctgttggccagattttcttttttctggtactacatctcttataaaatcctgagctgtctaactatagggatttcctatagccttactctctattggtccctactcttacagccaagagccaataagcccatcaattacatttctaatatataaatgtgaaaggaaaataaatcttggaaccccaaaatcactaagctaaaggaaaaagtcaagctgggaacttctcatggcaaacctgcctccctttctattcaatgatctaaatgtgtctcccaaaaagcaagatgttggaaacttgatccccagtgcaagtgttcagaggtggggcccaaaaggagaattgataaggccatgatggcagagtcaacggattaatgctgttattaatgtgagcacccctctgtgcactgagatgatgcatatctgattgccttcttcagagaggctaatcagaaactcgaaagaatgcaaccatttgtctcttatctacctatgatctggaagccccctccccactttgagttgttctgcctttgcttcgagttgtcccacctttctggaccaaaccagtgttcatcttacatatgtcaactggggtctcatgtctccctaaaatgtataaaaccaaactgtgctctgaccaccttgggcacgtgttgtcaggacctcctgaggctgtgtcacagatgcacgtcctcaaccttggcaaaataaactttccaaattaactgagacctgactcagatatttggggttcacataaccaggggagatatttctcagtgttcaatgggacaccttcactattgacttatttccttactcccatcctgtctcagtaagtctttgagggaggaacagtttactcataaccccacttctggtaccaaagttgatctttgttaatattcttctgattatttcattcgactagaataggcttagacacaaacatgttgttgttgtattttaaagtatgcagaatctgtggacaggaatccagccaggtttcaggaaaatctgtgactcagcctggactcccattaccacatgactgagaacatggctggcccctttcttgactatttaaatcactggtttagccacaggaagggctgactttcccagctctattccaaaattctggtcaggggaatctctgttggccaagtttgggataatgactactcttggttcaaacttcataggccaggatggaggtagggttagggttggggagcaggtaggatgatattgtacggaatggacaccagcacaattgtcaaaataaggggctgggattagagacttgtttgaacagagaagacatctccaaaaggtaaacaaaaacctaaagatatacaggcacacctcattttattgcatttcactttattatgcttcacatacattgcattttttacaaattgaagatttgtggcaaccctgtgttgagcaagtatattggtgtcattttttccagtcacatgtgctgactttttgtctctgtgtcacattttggtaattcttgcaatatttctaactttttcattattattgtatctgttatggtgatctgtgatcagtgatttttgatgttactatgtacatgtacatagtatgtacatggtaactatgtacatattactatgtgtacatacatgaccctataagacagtaaacttaattgataaatgttgtgtgtattctgactgttccaccaactgaccattctcccctctctcttcctctcctcaggcctccctatgtcctgagacacaacaatattgaagttaggccagttaacaaccctacaatggcccctaagtgttcaagtagaaaaaagagttgaatatctctcacttcaaattaaaagctagaaatgattaaccttagtgaagaaggcatgtcagaagccaagatgggccaaaatctaggcctcttgtgccaaacagctggccaagctgtgaatgcaaaggaaaggcgcttgaaggtcattaaaagtgctactccagtgaatgtctgaatgataagaaatctaaacagcctattggtggtatggagaacgttcgagtggtctggatagaagatcaaaccagtcacaacattcttttaagccaaagcctaatccagagcaaggccataactctctttaatcctgtgaaggctgagagaggtgaagaagctgcagaagaaaagttggaagctagcagaggttggttcatggggcttaaggaaagaagctgtctccataatataaaagtgcaaggtgaagcagcacatgctgatggagaagctgcgtcaagctatccagaagatctatctaagatcattgatgaaggtggctacactcaacaacagattttcagtgtagacaaaatagccacctattggaagaagatgccatctaggactttcagagcttgagaggagaagtcaatgcctgacttcaaagcttcaaaggacagactaactctcttgttaggggctaaggcagctagtgaccttaagttgaagctaatactcatttaccgttctgaaaatcctagggcccgtaagaactaagctaaatctaccctgcctatgctctgtaaatggaacaacaaagcctggatgacatgtgtttatagcatggtttactgaatatatatatatacacatatatatatttttttatagtctggaggtcttttttttttttttttttaacaagtattatgccatgagttcatacggaataggttccagcagctcaggctccttctcattggttctcacaaagtgtgcttctctgggtggagcaggctggcacttcagttgaacccaggtacctttctctttggcttctttctttttctgatcattttccttcatgtatttcaggaagctatcccagctctcagagtgcttaatgtgctcaatacgcacattaattctcttggcaagaatcttgctcttaacttgtttgtttacaacaatgccaacagcatgctgggtaacattgtagactcttccagttttaccatggtgacacttgtgaggcattcctttttgaacagtgcccattcccttgatgtctacaataacacctttcttatagattcgcatatacgtggccaaaggaacaactccatgttttctaaaaggcctagagaacgtatatcgggtgcctctcctctttccctttgtcttcgtcattttggcaaattactggaagatggcagttccggctgaaagggtggtttactgaatattttaaacccactgttgagacctactgctcagaaaagaagattcctttcaaaatattactgctcattgacaatgaacctggtcacccaagaactctgatgcagatgtacaatggattaatattgttttcatgcctgtgtaggggagtcagagatcaccttcaacactcccttgagcacttatgtgggctgttcggctggatctagaaaccaatgcacacccaggtaaatgaacaagagaaaagcatatgaatgttatgagttttacatgtacatggggatcttcacaagagagtgaagtctgaagaagtggccaaagcaagatcttttcatactttttagataaagaacaatgaatttgagaagaaataacaggacaaagaaaatttggcaggggcagtaaattttctaggggtcactagaagatatggagagggaaactagtggaagataacagttactttgttaaatctatttattcaggtccattgtagccaccaaatcccagtctctgttgatcagagctgttttcttgccctggtataggtgagggtaccagtctccaagaggaatctttatggcttgctgaatgcagaaagaggtcagctagccctttctgcaatcataatttctttgatgttcccaaaataatcaatataccaagatatgattggtataataatcattataccaatcaataatcaatattttgagatggcacgtcctttgctccttcatctactaacacaacatccattctgcagcccatggatcaaggagtaattttggtttttaagtctcattatttaagagccatgtgttgtaaagatacagctgtcacagggagtggttcctctaatagatctgggcaaagtgaactgtaaaccttttggaaagaattcaccagtctagatgccagtaagaatatttgtgatttatgagacggaggtcaaaatagcaacatcaacggaagtttggaaaaagttgattccaatcctcatggatgaatttgaggggttcaagacctcagtagagacaataactgttggtggggtggaaatagtaagagaactagaatgagaaatgaagcctgaagatgtgactgaattgcttcaaccttgtgatcaaacttttacagatgaggagttgcttcttatgcatgacagaagaaaaagtggtcacttaaatctactcctggcgaagatgctgtaaacattgttgaaacgacataaaggatttagaatattgcataaacatagttgataaaagcagtggcagggtttgagaggattgactataattttgaaagaagttctactgtgggtaaaatgctatcacacagtattgcaggctgcagaggaatctttcatgaaagaaagagtcaatcgatgcatcatatttcattttgtcttattttaagaaagtgccacagccaccccagtcttcagcaaccttgaccctgatcagtcagcagctatcatcaacattgagccaagaccctctaccagcaaaaagattacagctagctgaaggctcagatgatcattagcatttttaagcagtaaagtatttttaagttaaagtatatgtatttttttagacataatgctattgcacacaatagactgcagtatcatgtaaatatagcttttatatgtgctgggaagcaaaaaaattcatgtgacttgcttcattgcaatatgtgctttattaagttggtctggaagtgaacctgcaatatttctgaggtatggttgtataagatgtattttctttttttttgagacggagtgtcgctgtgttgcctaggctggagtgcagtggtgcgatctcggctcactgcaagctccgcctcctggattcatgccattctcctgcctcagcctcccgagtagctgagactacaggcgcctgccaccacgcctggctaacttttttgtgtttttagtagagactgggtttcaccgtgtttgccaggatggcctcgatctcctgacctcgtgatccgcccgcctcagcctcccaaagtgctgggatgacaagcatgagccactgcgcctgaccaagatgtattttctatttcaagagaaatgtctgtagatgacagaaaaatcagattcaagaaaacaggaaatacccttgataccacctgctcagacaattactattaataccttggttttggggtggttttttgttttagtttttagagatggggtatcgctatgttgcgtaggctggacttgaacttgttgttcaaccctcccgttccctcctccacgtcatccttgggtacacgtcctaacagtcttttttccccattttttttttttttgagacagagtttcactctttttgcccaggctggagtgcaatggcgcaatctcagctcactgaaacctccgcctcccgggttcaagcaagtctcctgcctcagcctcccgagtagctgggattacaggcatgctcatgcgccaccaccccagctaattttgtatttttagtagagacagagtttctccatgttggtcaggctggtcttgaactcccgacctcaggtgatccacctgccttggcctcccaaagtgctgggattacaggcgtaagccaccgcacccggctgtgtccccctgtttttgtaataaattttacatatatgtggcggccaaatataaatgctcaccttgctttattagagactggaaactatttgatctttcttctcttttttgttgctttagagagacagaatacaaatatctcctctctcctcctgggaagctttgcaaaattaagcccttcctgccctggagagaaaagggtaatcaggtttttggttcttaaatgatagactgaatggctcatccaatcaggcatattgtgaaagaacaagagaagatgagcagtttgttggcatttgaggtgtgcaataaataatactgttccctccccaccacgttttgaactgattgaaaaataaaatacagtaatcagacagatggagatgaaattgtcagcactgatgaggctaacaggatctgcagccctgttgcctgttgggcttcctaatacacacataaggaaatatacatataaatatatttattatatataataaatatttatatattatatataagtatatattttaattatgtataataatatatagcaacatatatgtaataaatgataaacatatactttatatcatatataaacttatatatgaagtttattattatgtgtatatattatatatgaagtttataatatatgtttgtcatgtatacctatgaagtttattattatatgtaataaaaatatctattttattatacaggcagagtctcactctgtgtccaaggttaagtgcatggtgtgatcatagctcactgcagccttgacctcctgggctcaagccttcttcccatctcaggctcttgagtagctggtgctacaggcatgcagcaccacactcagctaattagaaacaaatattttgtagacacaagatctcactatgttgctcaggctagtctcaaactcttggtctcaagtgatctccccacctcccaaagtgttgggattacaggcctgagccactgtacctggcctggacttcctaatattataccccaccaccaactccttcctcaccagctgggacaatggttagtgacagccccctgcatacacatctgcaaaaatgggtcgtaccatattcactttgctctgaaacctgctctgttccttatcaataccttttactttatggatctccattaactgggatcttagttgttataacttcggactttttatagagagtgctgtaatgaacatctttattcatacattgtttttaatctatttgatgatttccttatgataaattccaagaagcggctcacattgcaactgtgtacatatattgccacattggtatcaggaagatggtaataattcagaatttagctaacagtgtttgaaagttcttgtttttccacatgctcataggcattggcaatcctcctttttaactctttgcaaatatgatagaccaaaacattgttttaatatacgtttctgttggtcactgaagttgaatgtcttttaatgtttattgcatatcccctcttttggaattgattgcctttgtcttttcatcttcttttattgattattaagagctctttatatgttaagaatgaaaccacctttgcaaaaattatgacagtgagaaaaatctggcatagcttactccatcttgcttctagcctcgaagttgtacctattcattcctggacacatgccaagctaactatagaaggcagttagtttacagtttaactttgaaacaaagacgattacagccccttcctaaaaccagcatctccttgctttgggaccaagattgcctttgtaaaactaacagattagccacaaggttaacatatggctaagagacatgtagccaggggccacaagattcctaaccttcccaattgcccctagagattgcatctattgtaaaacctaaggttggtgtttgaggtatttcccagaccctgcattctgatagaccagcttccaccacccagactggtaaccataccaagaaactgagtcaactgaagtcaacaatcattcaaccccatatgatttcatccctgaccctaccaatcagcattccccattcctctggctccttgccaccaaactatccttgaaaaaccctagcttctgaatttccagggaggcttatttgagtaataaactcccatccttccacttggctggccctgcaattattaaactctttctgtactgcaataccgctgtctcagtgaattggctttgtctgccacaggcaagaataacccattgggcaattacaaggacaatgatcttcttctcatcgtaatatgagcaaatatatataagcataatatgagcaaatacaaaaatgtgagtattgcaaatgactctctacatacactgtcttggtaaaattttgttttctggttttatggatgatatataggaatcacctggaaaattttcaacatacacaagctggctaaatttactaaatatttagtatattccagacactcctctaattgtctcacatacattaatttatcaaattctttaatcctcacagcaatagctctgacctgggcactgagaggttaaataactgcccaaaggcacacaatcagtaaatgggatccaaacttattgactggccacagaatccttgttctaactctgtcctaatgccacatgtattgagttgaaacactggagagtctgcaaagtttccttgggatgaagctggtatgtgcatgttaaaaaactcttcaggcaggctggacgcggtggctcacgcttgtaatcctagcactttgggaggccaaggcaggtggatcatgaggtcaagagatcgagaccatcctgaccaacgtagtgaaacctcgtctctactaaaaatacaagaattagctgggcgtgggggcacgcccctctagtcccagctacttgggaggctgaggcaggagaatcacttgaacccgggaggtggaggttgcagtgagccgagatcgcgccactgcactccagtctggcaacagagagagactcgtctcaaaaacaaacaaacaaaaaaacaaaaacaaaaaaaactctccaggcggttttgacatgcccccaggatgagtaccactgattagtagtgttttgtttgtattttgcctaacagaagttttaaatttttaatgtagtcagatttgtcctatttctgtcattttattctttagtactgcaataagaaaagagtcttcctcagcccaaatgcatcagttatctattgctgcacaacaatctgctctcaaaacatagtggcttaaaacaatagcagtatactacttgtttcaattatctggatggcatttaggtggagctcagctgggtggttttcctgctggtctcacctgggatcacttacacaactaaagctgacagctggttctggctttgggttggggcatgaaggagttccggaaattccaccccaaaataagccattttgaacttcaaactgagggcacttggggaagagcaaatgcaggaaggagattcctctgagcttcccttatctgcctgaagacagagccttctaaaggaactcagttgtcatgaatttcctccccaggaatctcatcagtcaaggctgtttaactcagatcacaggagaggaagctggaggtcaacaatatgtcaacactttgtcccaggctatcacttgttcttctgaagggtcatccatcattccccaaaaatcacttactctcccctaagctgcctacatcccctctttcctatggtgagggtatatatgtttctagatctcactgggttggagaatattcatttttccttcctgcaatgctcccatgcatgtaataaattgatatacctttttttcctattaatttgaccactgtcagtttatttcacagacacaattactgaatcctcaggaagtagaggcatgtttttctctcccctataggcacctcggttctgcaccacatggcttctcatcctctaagaggctagattggcctctttgtgtcgtggtggtctcagggctccaagagcgccaggtggaagttgcaacatctcttaaggtagaggctccggagctaacatgatattgcttctcctgcactatattggtcaaagcaggtcatgaggccagcctagatccaagggatgatatctttgttgacttcacttcttgatggaaagaacaacaaagccacattgcaaaggggagtgggcatggggaggcgtgactcattggatgccactcttgtaacaatctaacacaccaagatgttaaattcactcttctatgaagtcttctagtaccttttttttttttttttttttgacagaggtttgctcttgtcgcccaggctggagtgcaatggctcactgcaacctcctcctcccgggttcaggtgattctcctgccttagcctcccaagtagctgggattacaggcatgtgccaccacacctggctaattttttgtatttttagtagagacaggttttcaccatgttggccaggctgtttttgaactcctgacctcaggcgatccacccgccttggcctcccaaagtgcagggattacaggcgtgagccaccgagccctgccctactacctttttttaaggtaaaatttacataatgtaaaattaaccattaaccactttaaagggtataatttaaagagatgatccacatcatctctatctagttccaggacaattttatcaccccagagggaaaatccatacccattaggcagtcactccccattctcccctccttgctgcctcagcccctggcaaccaccagtctgttttgtttctctatggaaatcatacaacatgtggccttttgggtctggcttctttcacttgccatcatgcttccaagatttatccatgttgaagaaggtatcggtgcttcattcctttttatggctgaataatattccaccatatggatataagacagtttgcttggctattcatctgttggatatctgagttgcttctaccttttggctatcatgaatatcaccactctgagtatccagtactctcttgattcttcttaagttgaaatcatttccacatctgagattcaattttgtatgtggtttgaggtaggaaatttcacttcatttcttccacttattcctatgtattttatacactattcttcttatactgactttatcttcctcttttgttaaataacagtgtgtgcccttgagcaggttttaattttttattgtttattttttgagacagtctcactttgtcacccaggctagagggcagtgacacgatctcagctcactgcaacctctgcctcccaggttcaagtgattctcctgcctcagcctccaagtagctaggattacaggcatgcaccaccacacctaatatttgtatttttagtagagatggggttttgctatgttggccaggctggtctcgaactcctgacctcaggtgatccacccgcctcggcctcccaaagtactgggattacaggcatgaaccaccgtgcccagtcttgagcaggtttttaaaaggatttttttagagatggaatcttgctttgtcacccaggctgcagtgcagtggcacaatcatagcttactgcaaacttgacctcccaggctcaagtgatcctcctgcctcagcctcctgagtagcttggattacaggcgcaaggtatcacccctgacttgggcaaattatttaccttttttgtgctttaatttcctcatctataaacttgggatagtaatggtaacctacatagggttgatgtcaggattaaatgaattaatacgtgtaaagtgtttagaacagggtatagtccatagcaggtgccaagtaaatacctattatttaattccaaatttctacatatgaaaggatctactttctgttctgttgtcttacttatctatttcaacttttaatcagcatcccaagtctacttttattgttctttttcaaatcattttttagttcatcttggtcctttggaattcttcccattgaattttatcaagttctccctaaatcctgctgagaactttattggagttacatttacagattaatttaggaggaattgaaatattgttactaccaagtattcttatgccataacacatctcttcatttattaagctcttattttatctcccatgatagagttttatagatttttaaattttataaaggtgttgcaaatttcttttcctggatattcttttctgggatattttatatttttgttgttatgctgaatctttttaccccattatatttatttttatttatttgttatttttaaaaatattttttattatatagagacagggtcttgcttattgcccaggctgttcttgaactcctggcctcaagccattcttccaccttggcctctcaaagtgctgggattaaaggtgtgagccacagtgaccagtccttgttacatttaaccagctactattttctatatgggaaaactacagatctcagtcctttttttttttggtgatattctaatggtttttcattcatttaattttttgaaatcagataattgccatcttttctctttttccatcattgtatctattttttttcttgactaattgcacaggctaagactctcggagcaatattgaataaacaggcaatggtggctctaagacagggtttgaggaatggcagtgggcggcagggagtgtgcctgcagagcagcctgaatgggtatttcccggagggaaggtggtcacgtgtctagggaatgctccaaagaaaggagaggatggtttcagtacagagtgagggttgcgcctttgattaggtaagtggtgaacagttattagtgctttctgagcatcagactggcagagtcaggtcatattttagaaggactgctcaggtagaggtgaccacagggaggtgggacccagacaagtgtgacccattaagtccttacgaatcattaaaggagaggtgctaaggatgggagctgagtgcggctatgatggaagacgccaggagattctatggagattagtgttatcttaaacccctctggccctgcacatggggagagcaagttcatgcttcttcctaaagaagtgaagcaaggacggagcaattttccatctgatgtcaggccctccctgatggctggccccaagggcgacctctgtgatccttcctgtctcaccctggaaaaaaatgtctatattctcacttcatacttccaagttatgccttggttttttgggtttcatttttgttattggttgttggatgtaaaataaatagcaatgcataaaaactcaaatttttcagctgcgcatggtagctcatgcctgtaatcccagctatttgggaggctgaggtgaaaggattgcttgagctcaggaggtccaagctgcagtgagctatgatcgcatcactgcactccagcctgggtgacagagaccgtgtctcttaataaaaacaaagaaacatccaagtgttcaggcctcaaagggctgtggccccagctttcagtgtaactcatctcacaaatcagtggtggtaactcaacttcgtccttctgtggtcaagtttcccccaactgtctctgttatctgaccttccttggctcagccacatatgggtctgggagcacagtggtcatcaacaggtcgatggagatggctggacctcagcagcagaagagcaagaggagccagaggatgaaactccatctggaaactgtgagaggagaagccagcccaggccctgcaggagggagcagctactcttcccagcagaggcaacaaggaggggcaggagcaagcaggtagggagagaaggggcagccttcatggggcagagaggggaatgggctgatgggagctggcagggcttctgtgatgagtttgggcagtggggtgcattttttttgagatggagtcttgctctgtcacccaagtagggtgcagtggtgtgatctcagctcactgcaacctccgtttcctgggttcaagtgattctcctgcctcagccttgtgagtagctgggattacaggtgtgcaacatgatgcctggctaatttttgtatttttggtagagatgggatttcaccatgttggccaggctgatctcgaactcctgacctcaagtgatccgcctgcctcagcctcccaaagtgctgggattacaggcttgagccactgtgtacagctgggtgcatgtttaaaaatagaggtttgctgggaggtggaggttacagtgagtcaaagtcatcccactgcactccagcctgggtgacagagtgagactctgtctcacaaagaacaaaaacaaaaaagaggtttgacctgagaaatggagacacctcaaagtcctagagggatacacccagggggaggacaaggcccagcagaaagacctttgtccctctgaccccaggtcccaccaaggaacccaagctcttgtggtggggggcctacctagaccccactctcaagccataccctggctctgctgggcttccaactggccctagctgcccctggttgtctttattttcataaggatgaaagcaatgccgtgtccctggcttctgggacatcaaggtccgagaatgatggtagacagtggatagaccccaattttctgcccaagcccagcctgggattcctggctgggggctttgacttggcagctggcaccagggtgtctcatggggatgcaggtgatggtttgaaatagcctttgcaaaaattatgacaatgagaagacccactgactctatcttgcttttaacctctaagctgcccttgttcatttgtgggcatagaccaagctaacttatggaaggaatttaccttatagtttaacttcgaaacaaagatagtaacagccccttcctgaaatgaactcccttcttgcctggggaccacaccacctaggtaaaactaaggaattagccacaagattagaaattatggtttaggagtcatgcagccagaggccacaggattcctaacttccccagttgctcctatggataacatcacattcatcaaacctaagattggtgtttgagacagttttcagacactgcattccaatggaccagctggtgccacccagactgataaactggctcagctagttctatgatcctatctagtaagagaagacagcaacaagaacccacttcaatccccctatgatttcatcgccaacacaaccaatcagcgttctccactccctagccccctgcccaccaaattatccttttaaaaccctagtctctgaatgttcagggagactaatttgagtaataaagctccagtgtcctgtttatctggctatgcatttattaaagtctttctctattgtaataatgctgtctcagtagattggctctatctaaccagcaggcaagaagaacccattgggcagttacaggctgctgaatgacaaggctgctcttcccacacctgacagtgcctcagcctcagctggcaaaactcatcacttcacctgaaaagggaaaaaacccagagctatctctggcaatagaaggagcagagttttcctaagcatccaagacagaccccagaccctgaacgaggtaggagactactcatcctggcaactgcttactctgattatggggttatgaggcctgcttcaagggagaactctgaagttgcagctttccctttccatgacagaccttggctcatggaccacacccctgccccatctctgcttggcttgtgtttcatggtctgcatgaagaaccaatctaagtctggttttggctttatttatttttgagacagggtcttactctgtcacccaggctggagtgcagtagcaccatcacagctcactgcaacctcgacctcccaggctcaaggtgtcctcctgcctcagcctctggagtagctgggactacaggtatgcaccaccatatttagctaatttttaaattttttttttagagacggggtcttgctgtgttgatcaggctggtttcgaactcctgacctcaagcaatcctcccacctcggcctcccaaaagtgttgggattataggcgtgagccagcatgcctggcctggcttaatgttcatgtgcttgcccttgctggaaagagagcctattggcaattgatgcagagggagtgttttaattaatggagctggcctgaacatcaggctggtgcaactttactcaacgctaaggatgatcacagcttaacgtgggggagaagaaagcaatgaaagaaatagatcagatgaggcaatattgggagtttatgaagtctgtgtattttccagtggctccacagtgatcgctcttaaaccggctgtcacccccgcatgaattatcacctcaacctgggaggatggggaggccgacaagacatacaaccacacacaaggcacgggctcttgcctggatcataattcttcctcatgctgctaaaacggagagcgctgcgatagcaaagaggcatgtggcccttgtgatatcttcagaaagaaaaaaccctgggggcaagagaggaaagaagaaagctaagaaataaataacaaagcaggatgctatttacatagtgagggaaggcctttgagactgagctcagcgccttggatgtcagtaataactcagtgatgggaataaagagactcactgcaaacccacatcgcctgagatggtatcagcgatgtttttctctttgtttccagacaaattccagcacagcgatgggaagacaagcctgtcgaagggaatggtgaggtgggggtgagggtgagtccggtggtccccgtgaagactcaattatgttggctgtgaagagattaatgagaattgaattttctattgatgtaaaactgccttttgcacctgctgctggcatcctcattactggttttccattacaggggattatatggtacaacgaaataaactttatgcttcctgggggatgctcttaaaatgggtttactgtactcaaactggtggtgaagtgggttacctgagagaaatatgatttaatccctgtcttttccttttgtggaccagaaagcctctatccccttctggaaatcacgaggtgcagacgttttcaggtctgcgggccaggctgaggctctgcgaggtataggcccaggcatgccctgcttgctctgtccctaaacatcacagggatgatgaagttgaaggaatctttggcttcctgcatcagaatgaatcacagggagtgatgctctggaagagctggcccagagaccagagtgtagggaattggggtccttgggatttctgtaacttgtcctttgggaaggaggtaaatgtgtctgtcggtggaggcgtgagaggcatctgtggccttagaagataatgagcaagtaaacaccaggtgagagaaaactgcttcctgtcctgtgaaccacctgctcctccctccctcagttgagctggggaggccagggtccagggtgaaaccatctctgcccaggaaaatctcaataaatgcttctttaaattgttttaagttttagggtacatgtgcagggtccagggtgaaaccatctctgcccaggaaaatctcagtaaatgctttttttgttgttgttttaagttttagggtacatgtgcaggtttgttacataggtaaacgtcccgtggtggtttgctgcacccatcaccccatcacctaggtatcaagccctgcatgcattagctatttatcctgatgctctccatcccccaccaaccccagaagccccagtgtgtgttgttcccctccctgtgtccatgtgttctcatagttcagctcccacttgtaagtgcgaacatgcggtatctggttttcagttcctgtgttagtttgctgaggataatgacttccagcttcatccatgtccctgcaaaggacatgatctcgttcctttttatggctgcatagtattccatggtgtatatgtatcacattttctttaaccagtctattattgatgggcattttggttgattccatgcctttgctgtaaatgcttgttaaatggaaaatagtagcaccaccctcaagagcccttactcatctccaaccaggataagtactgatctttcagcctctgctgttccatctgttaagtgggcataaaccaggatggtgggggctatgggaagccattattctcagcagtttgatgtagaccttatttcatcgaaatcacctttatgatgctaccttctaaacacagcccaaaattggatctccaagaatgcaggtggtaccttgtgtttacatgagggtgcactagaaccccatgttatgggggagccctgtgagctggagtgggaagcctggatgggaagcagaagtgtcagaggcccacacacagctgtttgtgcttgtctctccctgaagcgttgttcaggatgaacctatcttgagccccagagtccacagatgtcactgcttctcctgagcagctgccatggcagatgctttcccgaggcagggcgggggaaatggttgggcaacggctgggcactgccttaacttctctgaagcatcattaaatttgtgttcaaagtgaagattgaggaattgggcgcagtggctcatgcctatcattccagaactttaggaggctgaggagggaggattgcttgagcccaggagtttcaaaccagcctgagcaacatagcgagacctcatctctacaatttttttttaaaaaatagctgtgcatggtggcatgtgcctgtagtcccagctactcaggaggctgagacaggaggatcacttgagcccaggagttagagggtgcggtgagctatgatcacaccactgtactccagcccagacaacagagcaagaccttgtctataaaaaataaaaaaaaagaggctgggtgaggtggcttgcgcctgtaatcccagcacttcgggaggctgaggtgggcggatcacgaggtcaagagatcgagaccatcctggccaacatggtgaaaccccttctctactaaaaatacagaaattagctgggtgtggtggcacgcgcctgtagtcccagctacttgggaggctgaggcagaagaatcgcttgaacccaggaggcggagattgcagtgggccgagatcatgccactgcactccagcctggtgacagagtgagactccgtctcgaaaataaagtaaaataaaataaaaataaaataaaataagaaagaaaaatgtttattgtaaaataaaacagacagaaaaaaataagtcaaacacatgtatagcttatggagttattattacagccaccacccagaccaagaaatagaactttgccaatgtccctgttgtccctgggaagcacctcctgggtttccttctagtctgaactgccaccttccctgcaaaaatgaccctcacatgacttttacagtaacctcttttctgtctttctttatgtttttgtcagagttttttgaaccagagcaactccatcttgaataggggctgggtaaaatgaggctaagacttacttggctgtgttcccagatggtaagggcattctaagtcacaggatgagataggaggtcagcacaagatacaggttataaagaccttgctgataaaacaggtcgcaataaagaagccagccaaaacccaccaaatccaagatggcaatgagagtgacctctggtcgtcctcactgctacactcccaccagcgccatgacagtttacaaatgccatagcaacgcaggaagttaccctatatggtctaaaaagggaaggcatgaataatccaccccttgtttagcatgtcatcaagaaataactataaaaacgggcaattagcagcccttggggctgctcttgtctagggagttgccattctttattcctttactttcttaataaacttgcttttgctttgcactgtggactcgccctgaattctttcttgcacgagatccaagaaccctctcttggggtctagatcaggaccccctttctggtaacatctttcatcacctaagtgtgccttccaagacatatgatgtagttttgccattttaaaaaaatgcgatctatcgtttgagtctctttcaatccacaggtttcctcccacttcttttctttacaatttctctatcgaggaaccaaagccttttgatccacagagttcctactgtcgggattctgctgattgatactcttggtgcagttcaagatgttcttccctatttcctgcaaattggcagatggatccagaagttggatcacactcaccttctgtccttttggcaggaccagaggtgctgcattccttcgttaggaggcacataatatccggtttgcctctctttgtgtgatgctaacagctgttgcagcacaatgcttagctctgttaattcactaggggtttcaaaatggtgatattctaattctgtcacttcctcacatattaacttgagtacttttaaaaagagatgcttccagtcgtccaccatttgcttacccagtggtacagttcacatattaaacagaggcaggataaatgtgcgattctttcctcattatttacctgtttttcagagagtgaatttgttcctcatcctctgaaggtgacaatgttttaagtagtttcataaattgaagatttaaacatattttatgggtttttatccatcacaattatcgtctttactgatgctcaaatggctctatgtttggccagtgggagccccttgcagatggttcccgtgtccttttgatatgatcttttagtctctgatagcctccttgctatccagcatgacaagatgtccaggcttatcttacacatttcctgttctagacctgcaatcagccatttttccaagaagtcctggtttcaatcagtagagaatctatctatctatctatctatctatctatctatctatctatctatctatctatcttctatccatctatcatctatctgtttatctatctttttaaaaaagaaaaaatgtcaaaagagtgagaagacaagccacagactgcaagaaagtatttcaaaagatcccagcactttaggaggacaaggcaggtgaatcatctgaagtcaggagttcgggaccagcctggccaacatggtgaaaccccatctctactaaaaatacaaaaattagccgggcatggtggcatgtgcctgtaatctcagctatttgggaggctgaggcacgagaattgcttgaaccctggaggcagaggctacagtgagccgagatcccgccactgcactccagcctgggtgacagggtaaaactctgtctcaaaaaaaaatttttttttcaaaagatatatccaatagagaactgctaaccaaaatatacaaagaaatgagctatcaagccatgaaaagacatggaagaaacttaaatgcatattgctacgtatacggagccaatctgaaaatgctgcatactatatgattccaactctatgacattctggagaaggcaaaagtgtggagacagtaaaaaactcagtggttgccaggggtttgtggggagggaggaatgaatcagcagaacacagaggatatttagggcagtgcaactattctgtgcaatactgtaatgacggatgcatgtcattatatatttgtcgaaattcacagacaataagagtgaaccataatgtaaactatgaactttggttgatgttggtcaatgttggtacatcaattgcagcagacgtaccacaacgatctggagtactgatggtggaggaggctgtatgtgcctatgggaagggggtatatgggaactctctgtactgtccacttaattttactgtgaacctaaaactgctctaaaaataaattctattaagaaataaatgtaaaatgtctcatatgtctatattgattcttccaattcaaatgtagaattattgggtgctggtcgggcacagtggctcactcctgtaatcccagcactttgggaggttgaggagggaggatttcttgatcccaagagttctattgcgaccagcaaacatagcaaaatgtccatctctatgaaaaaaaaaattaagaattattggaggttgggtggagtgactcatgcctataatcccagtactttgggaagctgaggtaagagggctgcttgagcccgggagttcaagaccaacctgggcaacatagtgagactccatctctacctgaaaaaaaatttgtaaaggaattattggatgtttacttaaattctttcttattcctgaactcctttttctcaccaaaaaaaatcctagttctcaaaggcccaggagatgacagaattgaaatacacaagaattacttatttcctttatcccatattacacacacagcattcttagtataaaatgccaatactacttccatcaacatcattattgaaaacagttaaaatttttttattatgctttttttctgcatgcatttcttattctcttatccctcaatttataaataactgtactatatctatattgtcagagaatatagccattatatactatgcttttttaaaattttcacttattcttaattctgtaaattatatatttaatgttcaccaccttatgttgatgtctctctagacactttgtttctctgaagttcattctctagtgaattcctcaggaaggaatcatgggaacaatatttcctgaactgttacatactgataagtttgtttgtaccctttatacttgaaagtcagtttccctgaatataagatccttggctcacattttattttcttgagttatttaaatatgttactcaattttcttctggcacaaatgttgcagtcaaaaagttgatgataatccaatttccaatcccttacaaatcatgggctatttttgcttagacactcaaaagatttttcttttcctttgaagttctatcatttcactaaattcatgccttggtgttagtcattctgggtcagtactctcaggaacatggtgtgacttttcaatatgtagtttgaaaactttttatttctaaataacatagtacctttttgaactatagcttctagtatttgttctgatccctgctttgggtttttcttcagggaaccctgttctctgtatgttggatcctctttacccaacttcgagatttgtcactttctcctgaagcctttatatccttgctcatttcttagatttttaaaaatttccatttgtttcattttctgtttcttctgaggaattatctcttgtgtttattcactcttgcaatctttctaggttagtcttaatttctgaaacttttttcttttaaactcatttccccccctaaatttgttaatttctgagtttttctatttctgatttatgttgggtttttttgcatcttattttgtttaaataattgcttctagcttgtcttaaaacagtaggttatagttttttgttttgcaggcatatcttttggcatgtttttcattatctgtgaagatgttattctatttcttactctttttaaaaaaaaactgtatagagtaggactttgatctttgcctgctgctcatttttgtaaaggtgaaattaatttttctgaacttaaaaatggggttgagttcaagacagcttttataacttcacaaagctttctcttttgttgttttcatgcactgttaaaaaatatggcagcttattttattttatttttttagattcctggttcttataaaaatgtctctacttttatctggatactctgcttccttcccctctatcattcctgctctattcaattttgtttcctgtttcagcagtgtcttcttgatgtgcagccttgtcctggaaggatgacctggctggtcagtttcaagagttcacaggggctatgctactccatcctcttctcatctttttacatgaggccctttgtacttacacactaatggagtgagcaaaacccttcccgtttcagctcctgttgtgaagctggatctctgtactttccagtgaatgaatacctattgcctctttggggttactccttgtcttagtccattttatgttgctataacagaatattgagtaatttataaagaaaagaggtttatgtggctcatgattcttggggctggaaagttcaagatggagcagctgcatctgtgagggcctcatgctgcctcaactcttgcctaaaatggaagggaagtggggatgtgcacaaaaagatcacgtggcaagggggtaagcaagagggagagaaaccaaggaagccagactctttttgtcatcctgctctcattgtaactaatccattccctcatgagcaagaactcagtccctagagagggcattaatctactcatgactcaaacacctttcactgggccccacctcccaatgccaccacatagaggatccaatttcaacatgaattttggtggggacaaacaagtcacatccaaactgcagtttcctgttcttagagatgacaaacaccctgtttcttccctttgattccttctgtatgcatactaatactatgccagtttaataactgttagttacaaaataggcagtccctacccaccaatattttggtgttttaggggatgcattgcccactagttttattgtgagtgtttcccataggtttttggttttgctatctagtttgtctgttttttattagtggcatattcaaaatgatgcccctaacactgttgccatcttctcaaagacatcccaggaagaacttcaatattgacaatttaacatccttaaggaatgcgttgtaacaaccaaactggaggagaaaaagtatgtaaacagtagtttgcatagagtgtcttgtgctgattatgacactgtagcaggtcttgttgatggcttcccatatctgctcagcccacccgagctcaacctcaggaggcagttgtaatctcaagcacctacatctctcttcttctttaccagggactttccctggtaccatcaaagcttgccagcctgccttgtacttcctgagatcactcccaaacaagctgcctgaacccatgtgcttgtctcttgcctccttttgggggaacaagccaaggtagacaccaagttgtgttccaatagcctggcctgattcaagcatctctcatgtagtgtaatgatatggtttggctctgtgttcccacccaaatctcatgtcgaattgtaatccccactgtcggaggatgggcctggtaggaggtgactggatcatgggggtggtttctaatggtttagtaccatccccctagtgctgttttgtgatagagttttcatgagatccggttgtttaaaagtgtgtaacacctccctcttctctctcttcctcctgctcccaccaagtaagatgtgcctgcttcttcttccaccgtaattgtcagtttcctgaggcctccccagaagcagaagcctgtacaccctgcagacctgtgagctgttaaacctcttttctttatgaattacccattctcaggtagttctttatagcaatgtgagaacagactaatacatgccatctggttatgattttcaaaaatggaataatgttagctttatatatatatataaatgtgtgtgagtgtgtgtatgcatatatgtgtgtgtatatgtgtacatataaaatatatattatatatgtgcatatatatatatagagagagagagagagaaagagagagagagagatagggtctcactctgtcatccaggatggagagcagtgatgcaatcatagctcactgcagcctcaaaatcttgggctctagcaatcctcccacctcaccctcctgagtagctggaactactacaccacacctgactaatttttgtactttttgtagagacagggtctcactatgttgcccaagctgatctcaaactcctggcctcaagtgattgtcccatcttggcctcccaaaattctgggattacaggtacaagccactgtacctggcagcttaatatttttgatgacctttggtgagaaatctgtttagtctacataaattaaatgcttatctttccttgtctacaccctatttaattccctccagaggccctgattgattagtggcctgccccagacattgtctttcctaaatgctaggtttgttttccagaattcagcaatcttaccttctaattgcaggttctattttttttttttcttttctgagcacggaagtgagattgctttatctgtaggtgtcagggtatcctctgtgtttaacaaaatacgtgttgaatcattgtctccttggtttttatgactgagagtcttattataagtgaggccatgccaggtgagactaggtcagggcaaatgcgacctttgatgcctgattcccagcgcagacaactcagccaccttgttcatggctccatcccagtctgccttgcactctagttaaagtctgtctgtccctgtctgtctatctgtctgtctatctgtcttccagccttcctccttgagggtgagctgcattacccctttgcactgcccaccgcctgccccccacaacctgtcccttgcagttcctcagcaagaccttggctggacagtctgtgcctgaaggcagatggcccagacaccagtaaagggagctgggctttgcctccgagcctgcctccagctagggcttgggcttgggcaccatcttagcacatctgtaactggggctgagctggcccatgctgtgtccccctgaatcttgggacaaggcaccaatgcaggaacaggcgtgaagggtgcactcatcagagcccaagacatcactgcaacaagaatgcatacaggaagctctctctgaggacagggacgggggacggagtgtgacaggttccacactgcgatattcatggctgcctccgtgccatagggccccttgcatgatgtcaaaagaggagacttgcatcgtcttgttgttttcaagctaactttaaacacaactgacagcaagatgtctctggcacgaaagccaacagggaggcgactgtctctctgtttccatagctacagacaggacgccactgggcagtgctttcaactccagggcatcccaggctctgcctgagggatgaagtttcctgggtgctgggagaacccagccacaaaatggcagttgctggtctcagtttctgccccaaccaccttctatttttggtgagagagtatcatttttccagatgtccaagggtgtccattcagaacacacttctgcagccaggaatctgggaaagccggagatgtctccataaaccttctgcaggccatgccatctgctgaccttgacaccttctctgcactggaggacggcttagcaaagctggaaagggggtgtcccctgggagcctggctggctggctgtcacttgctgagccagggacagaaggagttgacagtacattttagtattacctgcttccaatttggaaaaaattttgtgcatctcggtttttccagtttctccttcacctctgtggacctgtaaaataaggatttgagcacatccctccaaagctaacttgtaaatttcctgttgcactgatatggttgggctgcttccccactcaaaatctcattttgaattgtaatctccataatccacacgtgtcaatggcaggaccaggtggaggtaattggctcatgggggcagtttccccccatgctgttctcgtgatagtgagcgagtctcacgagatctgacagttttataagcctctgatatttcccctgcttgcactcactccatcctgccgccctgtgaagaggtgccttccaccatgattgtaagtttcctgaagcctaccccgctatgcggaactgggaattaattaaacctttttcctttataaattaccccatcttgggtatttcttcatagcagggtgagaacggactaatacatgcgtcttcccgcaggagagtggatggcagaggcttaccttcaggggcccaggtcgggtgctggacatggggctggcattccaggtctgctgctctcggatgtccctctgaggggcatcctgcctgatgggtgggctccccctgatcttgtctccttggatgcatcatctgtgaggcttttgttttcagtcccagtggagagattcatactgccaggcactgtgtgggctcctgtgcgttgtgaaaataacgcttattcaggactgcctagggaagaaaggccatacctgctgctgtttttccatctctgctgtggccgcccacatggtttacggcacaacttgcctatgccaaaagggactgagaaaacctggaaacctaccaactacatttgggagatttttttttttttttttttttttttagaatgtctgtctcgggcaggcaataactagtaccgagcttggtgacccttttgctttctagctctgggggtgcagatctgagcctcctccagaatgcagtccccctagcctggctatgacactaccactggtgtgtccttgatgccacatttctaagcccatctgatcataaacctccctggggcagggaagtctcagagtgcacttcctcacctaacggcatgcctccagtggcatctgataaatgcttctgcagtgttcctggggaaacagttttattcatttcaaagtaatcctttctttcttctcaaaatctccaaacccaatccttaaaaccaagcattacatttagaatagaattcaagtttggattttaaaaaatgcttttaagtacgtcaggaactcagaagatacttaagcccaactttcctaccacatgatggaaagacacttggaaaggacagaagagttttgttgttgttgttgttgttgttttgagatgaagtcttgctctgttgcccaggctgtagtgcactggcatgacctcagctcactgcaacctccgcctccccagttcaagcgattctcctgcctcagcctccagagcagctgggactacaggtacgtgccaccatgcccggctaattttctgtatttttagtagagatggggtttcacagtgttagccaggatggtctcaatctcctgatctcgtgatctgcccgcctcagcctcccaattctgagattacaggtgtgagccatcgtgtccggccaggacaggagttttgaaaatgcactctgggctctgattctggaaaggagatcctgacttcagaggccctgctgccctactcagactccagaaggttgagtaaagttgagcaagctacagccactctgctctgggaagccagtagcaagtgctgagcctggacaatttgaactaagccagagagctctccaaattagggagcatttaaatagaagtgctgtttatttaggtcatatagtaatttccttattttaatcgctaccccagttaatgactaacaacatataaccaaacaaggttagcccagccaacttgactgaatagagagaactatttataatgagctcattcgtatctgaatgcagatagatgcacagaaggactccaatgttaatagaagtcaaaatccatttactgtacaaggtgggggagatgttccccctgcaagcctattcccactgcctttgactgacagtaaaaaagtaaacttcagcctggccgtgtatgacgtgagtgctgaattagtttggttccaattaaataggatttactgaattgtgacatggacatattctagaattttaaactctttaccccaaaagtaaaaagaagaatctctactatttctgtcaagagcgtcttagaccccctcctgcagttcatcatcaccttagacagtgtccttcgccccaccacgggcaggcctggagaaggagccccgccactggaggatcatccgtctcaaggatacttgggaactgaaggagtgaccaggagcaggcagtccagtggagatcttttttttttaattaagaagcatcaaaatgaacttgagtttggcaagacctcaatagagtagccaagctggctccaagcctggtttgcatggaggggctggacttggcttgggcatggctctgtcttgggctctggggtcagcaaagccccctgcaggcctgcccacctcaggctgtggggagcgcatcagggccaccaaggcagtgagtggtctgcagctctagggatggcgacccatcctagagagccaacagctgcccccagagtactcgaaccttattccctggttcctgccttcttccctcctgggtactcagcgcctctctgctctgttggattccccagtgtccttttaagaaagtctggcagggcatggtggctcatgcctatcatcccaacacttttgggaggccaagcaggaagatgactcaagcctaggagttcgagaccagcctaggtagcacagtgagaccctgtctctacagaaaataaaaaataaaaaattagttggccatggtggtgcacacctgtgttcccagctactcaggagaacgaggtgggaggaccctttgagcccaggagtttgaggttgcagtgagctagggtcatgccactgcactccagcctgggtgatagagtgagattctgtctcagaaaaataaagtctcccctttctttgcaagttagtcatagtttctgttgtgcactctctagaaaaccacatctgttcaccaactctcttctgtgttaaggactggtgtcactttagcctgccccagaaaaacttctctttaaagagaaactattcctttttttttttttttttttttcagacggagtcttgctctgttacccaggctggagtgcagtggcgccatctcagctcgctgcaacctccacctcctgggttcaagcaattctcctgcctcagcctccccagtagctgggattataggcgtgcaccatcacgcctggctaatttttgtgtttttagtagagatggggtttcaccatgttggccaggctggtgttgaactcctgaccttgtgatctgcccttctctgcctcccaaagtgctgggattacaggcgtgagccaccatacccagccaagagaaaccattcttataccctgaggaatgatggtgaaatttcgaaattgtgacaggtatatggggttcagggatgcccagaacccccagcaatgttgcttatgcaggggatacccacccaggcatattgacatcaggaaatttcagacaactcaactcagaaggaaacaaagtgaccctccagctccttgaaaacccaagaggtgacagaaaaggggaaaggagagaggaggaaaaggcctgggaaggaacattcatcccataaggtggccaagggataccttggctggaaatgagtctgggccacgttccctggtgaggaacttttaggaatcatggaattgcacagcaggccttcagatcctgggcccccatccctcatctttcgaatggggaggtcgaggcctggggagggaaggcatggcccggagcccacacaggccccagagagcagctgaggaaggcaggtccgttcccaggaggagtctcccgcctggatggcactctgatcagcacgtcactggcctgtctgtgtgttgaactgacttcaggaagccttggggtcacaatattgcagaggccattacagggccagatgttggacgtggaagcaaggccaggccacgtcataccctgaggtgactagtctgtgggtggctaagggcagtctggtcacaggactccaattcccaaaatgccatgacacccttcacctttcctctgcagggacagtctattgtctctgcatacagggaacaggctctgaggggttaggagacaagttcaagaccccctagctggcacctgggagagctgaagcagacctcctggcccatcccatcattcccttcttcctcccatgggatgcagggagacagatgaggtgttcccgacctgccagtatagatggctcccaaactcctctgtggaacaagtcttcttcttcttcttcttcttcctcgtcttcttcttcttcttcttcttcttcttcttcttcttcttcttcttcttcttcttcttcttcttcttcttcttcctcttcttctcctcctccttctttttcctcttcttcctcttcttttcttcttcttcttcttcttcctcttcttcctcttcttcctcctcttcctcctcttcctcctcttcttcctcttcttcctcttctcttcttcttcttcttcttcttcttcttcttcttcttcttctccttctccttctccttcttcttttttttttaatagagtctcacgctgtcacccaggctggagtgcagtggcacaatctcagctcactgcaacttctgcctcccagattcaagtgattctcctgcctcagcttcctgagtagctggggctacaggtgagcaccaccatgccctgctaacttttgtatttttagtagagatggggttttgctatgttggccaggctggtctcaaactcctagcctcaagtgatctgcccacctcagcctcccaaagtgctggaattacaggcatgagccaccatgcccagcctgttctggttcctctcatggcaacagatggaaggttcaggactcaagactcagtcttgccaaacacaatgtgagacagtctcagcttcccactgtgccaccttcagcctccagcccaaagacgggcaggaaccttcacttgcaggaacggcctgaggaaagggagcccagagccagtggaggcgggggtctgcctgcgtcccagagccaagccccctcctctttcctgtatccttgttgcagcaaacagattggcacctgaacctctctattagcccttctggggcttaggctgtgggcgcatggggccatgcactaaaaatgtctttcaccttagttgggatgcaaagagacaagtttgccactaatctttcggtggagacacacatatcaaaaatcgcaagtgagcacacaaggcttcctgcagggaattgcagccttcctgctcctccctcgctgcagaggctgagcctgactttcaaaaaagggcacgcagcccttggcaaatctcggaggaaaactcactgcgagttggtgccaggggcctcaggccccctttggggatttcccccatggcctctcaaaacaagaaggaagtctgagttaaaaatggaaaatggagagaatgtcaaaggaatgcagcgttattgattcctagtggtgtctgcctgaatattagatgcaaataagtgctaataagtacagttgggaaagctaatggaaaaaccatccttcccaggaggatcgcggcacacagatgcacagtgttgctgagatggcttggctcgctccactcactggtcacggcaaagcctgtatagatgcatcccagggaaataaagcctgtgtagacttgtcgcatggaagtactcatggtccagagccccctttccagctttgaggctgggctctggaaatgggagctcctattatctccccattgcagttaagtctctctttctctctccgtgtgtgtgcatgtgtgtgtgtgtgtgcatgcatttgccctctggagtgttcatggtactgaagagattctcttgaccatcaggcctctgtggcaaaagttgtgtgctctgttccaggcctaactgcagacagggagctcatgggcagctgcccagccaagctatggtcaggaccttgggtggcaagaggggctgcaagtgtggggtaaggggaccacagggacagggatggggtcattgcactgtgagctagtccggcaagtgactttttgctcactccactctcccctctctttgttcctaccttctctcctgctctgctccaacagctttgggatgtaggatgaataagggttccactgccctgtttttcctgacacttgagtccctggcccttgcactcagctcctccaatctgcacctgactgaggcggaggagggtgatttcagacacacacacacacacacacacacacacacattcccctcatgcgtgcagccagtggagtgtgcctgggtcccagcgcagccccaggcctgggtcactccgagcctaaagtcctggaaagggaaccccagaacaaagcctatcccagtttggaatcatcacacctgggccattctccagatgcgtggagtccagcaaaatggtggcatttttgcatctcaattcgctcatctgtaatacgggagtgataatgtctactctgttgctgcaagaattaaaggaagaccatgatctctttgtcatgcttctatttatcttcttatctgtcctggtctatttttggatgctctgagcttacctggggcattaaggaggcctcatggccctggggctgaggggctccctggccgtccccaggagtggctctgctctccgcctggtgtcccccactctggtcagtcaagacccatgggcccagctcactccccaattccatcactcactctaggtcagctggtaggagtcaggccaaccagccagcaggtaccattagagaggagagagtaagggtctttcactttattaaaggcttctctgctgttgtttgaaaatactgagtgtcccttcaagactaacaggtgactgtgtgcacagtttcctccagctcctgtgagaaagcagttgccccccttcccaaggcctgcttgtcccctgcaggctggggctgcctcttcttaggaagaacaaggacccgaatccagggccccgtgttcctgtccctactctgtcccggtgctgtgtggccgtgggccggttccaccctccacgctgttttcccgagtgtgtatgaagagggtcggttggccccgctctcaggctggtgacccgacacaaacttccaggatgaagtcctgaagggagcacctgttcgcagggcactttcagcagaatctagagccccagggatttgaggatggatgcggacacccgggcctgaggcagctcgcggccttgaccgaattccacgcgagctgaagcccagggatatcccagaatcttcctcaggatcaatcttccgcctttcaccggccctgcgcccccgcagcatcgggtcctgggcgcgcgcccctgccccgctgtggtcaaggcccgccccggtgacgcctggtccttttcccgggttggcgccgcgtgcgacccaccgaggcagtggcagcactggccgcggtctggagcctagcgtcaggccggagtccggctctcctgaaccgggagaccggcgcagccccagccacgaccgctcccacccccgcggccgccggaccgcgcccagcagcgactctttctgagagcgctgccagaggggccgcgggagccgcagagcgcgcgtgggcgcggcgcccgcgagcccccgggagggccgagtgcatcgctggagcgatccccgcccggcccggccaccgccgtagccgccaccacggcggggcggggcacgggccgggggcggggcgccgggcgggcgcggcgctatttccagcctcgccggaggcttcgctctcacttcgctgggagccttcccggcgcgcaagccggatccggcagtgctgcggggaggagagaggacgaggcggcggcggcagcaggaggtgggggaccgatcgcgccgggggccgaagaggaacgccgccccgcgccctctcgctccccgcacgctccggctgccggccccacgctgctcgcccacagatcgcactgggttccgcttggagcgggcggaggcaccgggcccgagctgggtcggaggtcctctccgccgcctgcgcgccccaagcagaggatccgccgcggagaaccgctcccggactggaggcgcccgcggcctcgggtgcgtccgctgcgccaggtaagtggctgcgcccctgccccacccctgttcccgccctgcgcaggctcctggcctgcagagacgccaggaaggggtcccgagcgggccccggactgcaccgctcgccatccccgccaccgcacgcgaatgggagtccgaagctgcgggcggaggtgggcgcgcggggctcgggtctggttgcactttggggaccggccccggtagcgggaactttaattagactttctctccttggatctcactcgctgccgcgcttctgggaactgccgtccctcgggccctcttggtccctgcggactcccgctccgcctcctggccctcggtgctgcccgcggggaggcggcgtcgggcgctgagcagcgagcgccgagggccaggcaggagcgctcggggcgctggggcttcctggcgcgctcggagccggggctccggacgggttgcggcgggcagagactatgggggaagtttaagtggccttggcttcctacccagcggctccgtcgcgcgcgtccccgacccgcaactctccagggcaccggcctgtgagtgctggaggcgagtgtgcgtgcgtcagcgatggtgtgaaggtgtgtgcgtgcgtgtgtcgggagtgcgggagtcggagcctggggcggctccagggggcggggaaatgatccgtttggccgcgggaccgagccgagctctgacggcggctgcaactccggctaccgactctgcagacccgctctggcctcgctggaggccagccgggccaggagggcgatcacgggttttggcagtgcccgatgctggggcttgggtctgatgtgaccccgattccttctccagtgcgggactcccgccgccctaactttcgcgtacatcttgtctccaggcccgcgaccccgacccggagttgaagcggctgcggcgccctcggctgtgggcgctgctgcccggctgtctgttttaacccagaagtaggcgccgatcctggggctctctgtcctgcagtcgtctccggcgtcccagaggactctgcgtccctgggccactcccgctggctcaggagccgtgatcagctccgttaaggggaacgcgcgtcccggcccctctccatctgcttggcgcgatctggcgcagcagcagagcacgtgggagaggcgttgggtgcagggaggtagtagctgctttggagtggatggtggagaggggcgggggacagaggggtaagaggcagatcaacccccttttatttcccaccgccgcccaaggcccccaggagctacaataccaagcccactttcctgggtaacctttctcttctgagttcaccttgacccttgcctacctgtggggaagtctttccctaagtcctgccctaggacagggcacccgtggagcaggtgtggcagagcccttaacattttccagctgtcatgacctttcctgcccaccctgtgccctgtcccaaaggcaaggcagacaggccacaggaaggacactcatcccagcaggagatcctcttttaattttaatcaggacaccccaagcacagaaggcggcgtgggagttcattcaggagcgttcagcagactggcctctgtgaagtgacccacgggaggaataacattggaaccctgaagagagggacctcttgagggtctgaatgttggttccagtgggactggctgatcaattatccaatagcatttgaacacagaaaaacctcaaagccggaacctgacccattgcctggcccagtcgccctgggacacacaaacagtgcagctcatttatttacttatttatttattaacctggaatcagactcggcaagagtgaattatgtttcccgggtattgatttttaaaaagaccccaaattaaaaagtcaaggctttcttaaagcaaggtcaaggattaattatttatcgagaggcatccatcaggcagcgtgggggctcatttataaattgcctgagcaggcaaaatgagcatcttttgattttccttggctccagttgggagaggagagcaggctcgtctgacctcctgggcttggtagaacatccccctcggactgtaaccgacgacagaggatgctttgtaactcagcctgctgttagagatgcctttataatcttgtagccagaatatcacttgggaaatttcatgcatatttgctgtgtttccataatgaacatttactgattacagggtatccagggaatttcattttttaaacatttattcaaatctctgtttatgtaagctaataagtctgggaaagttcaaaaacgacttttttgccgtatggttgttgagaaagtgtgtctggtgggctactctcagaatttgtcttcagttctcttaaaaaggggagagtcagatttgcctgattggaaacctcgcgcaggctgctcccctgctctgagctctgagttcctgccagaggcagcctgataggctttttgtggttttgctgatggaagagaggaaggggagctttgatcattgctgatgcgtctggctggagaaatttttagtgagtgcggctgtgcttgtaggggctgatggggaaggtgtggcccaagctgaggtccctggctgatgtccccatctcctgcctgctgcctggcctggaatctgagatccctgtcttagctacatctgctgctttgcagcttggaaaaacctccctccctgatttactggtgcgtggcagccacactggagaaacgtggggcagcggggaacctgtgagcaggaaagaggacacaggattatggcagctttctttctttcttttttttttttttgagataaagtttcactcttgttgcccaggctagagtgcaatgttgcgatctctgtttgccacaagctctgcctcctgggttcaagcaattctcctgcctcagcctcccgagtagctgggattacaggcatgcgccaccactcccggctaattttgtatttagtagagacagggtttcaccatattggccaggatggtctcgatctcctgacctcgtgatccgcccaccttggcctcccagagtgttgggattacaggcgtgagctaccgcgccccgcatggctgctctttagtgagcaaccgtggcaattagagccgataaacaccatgtggaatgagtggccagcctttcagctaaccagaaggtgacgagttataaactggagatttatatagtgctggcccaaggagatcaatgtgacccggcagtggcacagcaaaaaatgaaataaataagtaaatatgtttttaaaagatcggccaggcacggtggctcacgcctgtaatcccagcactttgggaggccgaggtgggtggatcacttgaggtcaggagtttgagaccagcctgacctacgtggtgaaacccagtctctactaaaaagacaaaaattagccgggcatggtggtgctcacctgtagtcccagctactcaggaggctgaggcaggagaatcacttgaacctgggagacagaagttgcagtgagccgagatcatgcccctgcactccagcctaggcgacaaagcgagactgtctcaaaataaatttttttttttaaattgaggttggtgcctggatgtagatatggcatcagtgtcctgcaacctcagaaagttggctgggcatgagcaatctgcatggtgacagcgtggtgacagtaggctgtttggtgctgtctttggcgccatattcagggctcatctgactccagagcggctgtgttccctccagaggaaacccacggacccagacaacccggggacagagctgcattagctcaggtgccagaggatgcggcagacgccatctcatttcttatcagctggaggatgtgtgaccctgtggtcagtaaatcagcatggcagatcgtgaggcttacaaattggtcatggaaaaaagttgtgacttttaccctgtacaaaactacctgtcatttgtgatgtggtgttctagcctgcactggctggattcattcccggacccttagaaactcagcaatgcagcctgggccaccgagagactggggaagcctccgtgcaggtgggttgacaccaagaagcagccctggccccattgccaaagccaccttttaggaagtcagagagtatctgtgcaataatttggatgtttgtcccctgtgaatcttaccttgaaatgtgatccccagtgttagaggtggggcctggtgggaggtaggtcatgggggtggcccctttatgaatagattaatgctattgtgaggcagggagtgagttcttgctctattagttcccacaagagctggttgttaaaaagagcctagcacctaccccctacctctgtgatctcggcacacaccggctcctcttctccttccattttaagtggaagggcacgaggccctcaccagatgcaaatgcaggtgccatgcttcttgtacaggctgcagaattgtgagccaaataagccgctttttttttccttttttttttttttttctttttagagacagagtctcgctctattgcccaggctggagtacagtggtgctatcataactcactgcagccttgaacttccaggctcaaacaatcctcctgcttcagcctcttgagtagctgggactacagatgcacaccaccatgtccattaatttttaatttttttttatagagatggggtctccctatgttgtccaagctcatcttgaacttcttgcctcaagcaatccttctgcctcagtctcctaaagtgctgggattgcagatgtgagccagcatgcctgtcctctttttttggggggggggcgggtggggtgacggagtctcgctctgttacccagcctggagtgtacagtggtgtgatctcggctcactgcaacctctgtctcccaggttcaagcagtcctcccacctcagcctcccaagtagctaggattacaggcatgcaccaccatgcccagctaatttttttttttttttaatatttttagtagagatggggtttcaccatgttggcctggctggtctcgaactcctgacctcaagtgatctgcccatctcgggctcccaaagtgctgggtttataggcgtgagccagcacgcccgaccctttttctttatatattacctagccttagggattcctttacagcaacagaaatggactaagacagtccgtatgcaggcctggggctgggggcagcagacacagctgtcctcccaggttggtggcctgggtcttacatccgcactccgcacgtagaacaccatacatttctgggaaatagtatttcttggtgctggtgactgagggcaagatgccctttccctgccaagccatgaccagtgttggccctgatgagtgacatttatttgaactaaattagaatcatcaacgttgaaacctggagccaaatgattctcagtcccacactcctggtgccaggcctgttgtcactgtccctcgccctgcccctgcatgtttatggagcaggtattaggtgtcttgcactgtaccaggccctgtggacatgaggtgagcaaagctaagggtggtccctgcccttgtgagttagatggagaccctcctcatttattcctcattcactaattcattttctgccagacaaagacattaataaaaaaaatgactaatgtgtgattctaggctgtgataaggatataaagaatataaggaaataaacactcaggtactatgagacctaccaaagagcaatctgacctgcactgagaggttaggaggacttctcggaggaggtggcccttcagctgcggtctgaaggaggagtgggaactaagcagggttggtggggagtgtgggaggaaaggatggggagagagaatccagcatgccaggcaggcacaggcaagagcatgcaaagggcttcctgtggagggaatgtgtgagagggcatgaggagcaccatctgggagctgtgggaaggcccatgtcgccagcagagtgaagaagcaggtgacatgtggctggagacccatctgtgcagggtcttcacaaccagggagggacttgggactttatcctatgaactgctgcagagtaggaagaccagcgaggctggagctgcaggaatcttgcagaaagaccactgtggccttaaataggagtgaatgggcttcccctcagacattggtctggtccatcaggctctgtctcctggagccggggtggttgagcctaatgtgcaatggagtctgtctacactggttgaaaccagtgtgtgatgtaggcagtgcatctacgctggttgaaactagtgggcggtgtaggcggtgcgtctacgctggttgagctagtgcacaaagcaggcactgtaacactggttgagcccctagttcatgatgcaggccatctgtttatactggtggatctcagcacaccattcacgccatctgtctacactggtcgaaccagtgcattctgcaagtcattctgtctaaactggtacctggctggattaggtgtgggaggggatgtggtaaggagtggtcaggatggttacccatgggacgctattgggagttgtctactccctgagacagggctgccccctggagtgctaagcacctgtccactctggctgagtcacatcctcctaggactgggtggccaggctgctggttgtgtggccccactgtgctctgagcccttggttcttccactgccttcctctcttgtctgctcaccattcagccctagcacgtccagggcactcggcaagtgacagcccagtgcccatagctccatggtggggacaagctgctcgacggccagacccatggtcctggcccaacttttgcctcctgactcattgaggatgggcctccactgggggaatggagctgaccacccactgtggctcggatgcccacttccctccggagctgagtgctgcccagtggtggtctccatgtgtgtttcatccacttagcttcctggacccctagagttccttcacctgccacctgcctgatgtaacctggcagctggctggcacctgccccagaaagaatcctctcttatacccttttcttgctctcagccctctctccttttcctcctccccaagggagccagtctctacctgttgcaccctctgggaggggctctgcccaaggctgggagctccgcagtgccctctgatgttggtgaatttcctgtggctgtctgcagcacaggtcgggccctgggttccctgcagacatcggccctatctaccaggctctgtcctccagagctggggagcagggaagcaggtctgtgagtcaccccatttcccgttgtgcccatgctgctggctgcaggccctgagctgagtggccaccgagctgcaggcaacagcccaggtcgctgtcaccttgtcctcactgtctgggcctgagccagctcctccctgactgggccagactcggggacaggagggaagagagctaagcagaggatgctaggagctgcacattactccttggtcccctaggccccctcccagggctgattccttgcccagagggcggcctctccagatgagccttcctgggctggcctggccactccattctgtctgttgccttcaccactgtggacccctggacatgcccagatgcttatcagtgggaagctgacacaggagagcccctctgccagcagcccctagcccgggcacagactgactcgcacttggcagacaagtcgtccccaccttcgaggctgcctttttgggggctgactcatctcttgggacaagactcatcagcctaggcttgcagcactgagaccctcctccagccttgagctgcaggagctttgcttcctgtgccgcatccaggcacccagcaaacactgaccctgacctgccatatgcagagcctcgtacacctggccctggagaagttgagcaaacacaagcaggttacagtgttggtgcagatgctgctctttctggttgtgttggccaggaggagctcggcatggagaaggtactgagcgattgcttgtgggcaggcagagtgcattaaactgtgcagtctgtctacttcagcatagccggtgcgtggggaaggcagtctgtctacactggctgggccagtgtgtggtgcaggcagtctgtctacactggtggggccagtgcatggggcaggcagtccgcctacactgacggagccagcacgtgggtcaggcagtctgtccacactggtggggccagtgcgtggggaaggcagtctgtctacactggctgggccagtgtgtggtgcaggcagtctgtctacactggtggggccagtgcatggggcaagcagtccgtctacgatgacggagccagcacgtgggtcaggcagtctgtctacactggtggggccagtgcgtggtacaggcagtctgtctaactgacggagccagtgcatgggtcaggcagtctatctacactggctaagacagagtgtggggcaggcagtctgtctacacttggttgagtctagggcatgagcactagaacattccatgtagtctgtgcttgccccactctctgtggggtctttgcacaaggttcagagctctcaaactctgtagattcagtggcttttcctgtggctgagctcagcctgggtccgggcttcccctcagatgttggccacgtccatcaggctctgtctcccagagctggggtggtcaagcccagtgtgcaatgcagtctgtctacactagttggaatcagtatgtgatataggcaggctgtctacactgattgagccagtgcaaaaagccggcgctgtctatgctggttgggctcagcatgtgattcagcaatctgcccacacaggttgagctggggcagccagcctctctctggcttgctgaggccagagctcttggttctttctgacaccttccctttttcctatgtgattctttctcccgggaatattcctccttacacctcctatagacatctgggtctgatttgattctgacttccaaagactcagctttcgtgtgtctgtttgaatctccttggcagaggctgacatgggctgggagtggcactgggatcgcacgtggatttcccctccctgttgctgtgcctggggctgggcctgtgctggtgcagaggctacctgctgtcagtggtcatcactaccttgccatccctcgcgacagccactcacacgcctctttctcacaaaagtcatttagcgaggattaccaccttggtgtgcgtggtaaattgcatttctcctggttggggccatcttgctgtttcctgcttagatttggggcctcatgaggtttggcctcatctgcaaatttaatttcatgaccattcatccctgtgaaagcacaatctatgcctattatttcactcttcttgattccctcttccacgagttaatgtgtcagcgcacagccatggcaaccactccccgccctccctccaccccaggcagccacctctaggttgcggctgaagctgggacctggagtcagaccacctgggttcaatcctagccttaccactcggtcactgtgtgggctagggacccagtttcctcatccacaaaacggggttaacaagagaatccacctcctagagctgttgtgcctaagagtccacaatcagtggcagctgctactgctattattactattattattactactcccgttttatcttgggtgtcaggaagcatattggtcaagggccttgcctggtgatgtgacagaggcttagggggcaggcagccccactggccagtgtcccctcaagttctgctttttcttttcttgtctctctctctctctttttttttttttttttccagacagggtctccctctgtcacccaggctggagtgcagtggtgcgatctcagctcacagcaacctccatcccccgggctcaagtaatcctcccagctcagcctcccgagtagctggaactacaagctcccatcgccatgcctggctattgttgtttgtttgttttttggtatttttagtagagaaaaggttttgtcatgttgcctagtctagtcttgaactcctgagctcaagccatccacctgcctcggcctcccaaagtgctgggattacaggtgtgagctgccacacccagccaaatcatttttttctaagcagtttgctaatgatgtcttcttcttgtcctgcatgcaccattgtacatatttaagccttttattccaagtgtagtacacatacagaaaagcgaacagatcctacgtatacaatgcagtgaatgtctgcaaactgagtgtgctgtgtacccagcactggagcagggatcagaacatgaccaggaccccagaacccccccatgacctcttccagtcattcccctccaccacagaaaaccgctccccttacttctaacgatatggattggttttccttgtgtgtgtgtgtgtgtgtgtgtgtatgtgtgtgtgtttgagatacagtctcactctatcgcccaggctgaagtgtagtggtgcaatctcggctcactgcaacctccgcctcctgggttaaagtgatcctcctgcctcagcctcccgagtagctgggactacaggtgcatgccaccacacctggctaatttttgtgcctcagcctccctagtagctgggattacagacacgcaccaccacacccagctaatttttgtatttttagtagagacggggtttcaccatgttggccaggctggtcttgaactcctgacctcaggtgatccacccgcctcggtctcccaaagtgctgggattacaggcattagccaccacacctggccccttgtttttaaacttaatagaaatggaatcatgcagtatgtatgctcccatgtctgggtcagcatctggtttctgagattcatccatgttgttttgagttgtgttatttgttccttcctctttgtacaggattccatcatgtgggtagaccctaatttattttccagtttcttgttgattggcatttgggttagagtttttggcttttatggacagtattgctatggatattcttgtgtgtgtctcttagtgatatgtacacattttttccttttttagagacaggatcttgctctgtcatctaggccagagtgcagtggcgcaatcacagctcactgcagccttgaactcctgggctcatgccagcctcccgcctcagcctcccaagtagctgggaccacaggtgtgcaccaccatgctggctaattttttatttttatttttgtagagatgggggggtctcactttgttgcccaggctggtcctgaactcctgagctcaagtgatcctcctgccttggcctcccaaagtgttgggattacaggtgtgtgtcatcatgtccagttcctgcacattcctgatgtacttagaagagaattgttgggccccagggtgcaggtactgttgaacagttttctttttcgtgtgtgtgtgtgtgtgtgtgtgtgtgtgtgtgtgtgtgtttaagacaagatctcactctgttgcccaggttgtagggtagtgacgtgatcatggctcacggcagccttgacctcccacgttcaggtggtcctcctgcttcagcctcccaagtaactgggaccacaggtgtgcaccaccaccactcccagctttttgttttgttttgttttgttttggtattttttgtagagacagggtttccccatgttgtccaggctggtctcgaactcctgggcttaagcgatcctcccgccttggcctcccaaagtcctgggattacaggcatgagccaccactcccgactccattgctggactgttttctaaaggggtcgtactgatgtttccacctcctcaccagtatatgcatgagtgttccgtacgtaactctcccactccacgtcctgtccaatacttggcattgtgagtttttcccattttagccattctatgagtatgccgaggtatcacaccgtggttttaattttatttctcagatgacgaatgcagttcatttttttaccaaggatattttggacctggaaacattattcaacaaatttgaaaatttcctttcgtccccaaattgtagaactcacttccatccccacattgtggaaacgtctggcagtgcttctgatttcttctgggcgggtttgaatctcccaggctggaagccaagggatggagtagacaagagtttctctggatgagtctggggaactggccacctgccccagaatcacgtgggttgctggtcagagatgcaggtgctgagccctggcccagccccggactcatcagacagcccttgacccattggtccttctagggctgttttttttttttcttgtcacgaaaccaaaaaaaaaaaaaaaaaaaaaaaagcatggatgctgccctttctgtcatgtccacggctgtgtcacaatgcccagaatagtcctgcacagggcagacctgctgggttgaagggtttcccattgttgtctccatcctctcccaccccagctgacttggcggggactcgttagtcaactgggctgccgtggtgagggctctggaagttggtttctcgctcgctggggggtgtcccatgtctgaatgacctcctccttctccaaagccaacttccaacagagctgcagccgtgcccccagcagccttgctcacccccagtcctctaggcactggccatttgagagcctccttgggcgacctcctccctgatgatgcatgtgttattgggtccctctggagaagcttaggagccccctgatcccccgaaaagaacagcaatccatccctgcaccatgcggccccctgagcttttccaacaccgtcttttcatagatgatgtgcccttggtcaaactaaggcagaagggccattcctgtcatcagctgctccactcctgcccctcagcgttttcatgaagaccgtggtgaagcctcctttctttgggtgtggcttgcccctccctcctcaagtttagcagaactactgggaaagcaggatggcctgggggaggagagctctgggtcagaccctttgggtggttttgagacccagtcactgccacaagaggagggaggcagtttcgtatacacaaccctgacttagctagcagggagggagggcaagggatcctagctgggattcctcctgtaatgccagctctttgggaggcccaggcaggaggatctcttgagcccagaagttggaggctgcagtgagttatgatggcacctcctccacagaggagggaggcccaggctaggcctcaaagatgggtgggggggtgacaacacctcatggaccactcagcatgagctccgtccctgagggccagcagtggaaaaaatgcgggcttagttccccggagatactgcggtccagttgacccaccacacaagggcataaggcgatggtcagggttcactggagagctatggaaggcttcttggaggaggcgagctggggattgcttacctcaaaggccaggggtgagaactttatcttggtacagtggaaattctctccaagctttgggactacagtgcatggacagtgtgagccaactaccgtttgctttaaaatagggcaaaaatgaatccatggcgcacacattgtttatgcgatgtggaggcgggcgcgcaaagacggaagagctaaaagcagtttgggaaaaacaacacttttttttttttggtgggaagacagattagagaggtttatgcttttctgtgataactaatatgaaaggtttatcaaagttaaaaaaaaaaaaaaaacctcttgacgctttctccaaaattgatctgaagacttggcagatttgaggaatcattcagtaacgttttacgagtcgatgctaatttgatgcggcagacctgtgcatcgcgccaatttactgccaaaccaacattaagcacggacctctcgcgcaaggtttataggcagacagctcataaagatgcatgcttgacaagtattctgcttctcttaggatgtggaatatgaagtgtttatcaaaaaccacctaaatcgcccttgccttgactcgtaaacaacctggcggcttcaggcttgggccctatgcagtatttcacgtctcaccactacgggtcctggtatgtgcgtgagtgcctgagtctttgtctccagaagccacagttagaggtagaagtgttacaggaaaggggtcccgatccagaccccaagagagggttcttgggtctcgcacaagaaaaaattcgggcaagtacataccgtaaagtgaaagcaagtttattaagaaagtagtccgggcgcagtggctcacgcctgtaatcccagcactttcagaggccaaggcgggcggatcacctgagctcaggagttcgagacgagcccggctaacatggtgaaaccccatctctactaaaaatacaaaaattagccgggcatgggggctggcgcctataatcccagctactgaggagactgaggcaggagaatcgcttgaacccgggaggcgaaggttgcagtgagccgagatcgcgccattgcactccagcctgggcaacaagagcgaaactcagtctcaaaaaagaaagaaagtaaaggaataaaagaatggctactccatagacacagcagcccccaaccactgctggttgcccatttttatggttatttcttgatgatacgcaaaacaagggatggattgttcatgcctcccctttttagaccatagagggtaacttcctgatgttgccatggcatttgtaaactgtcatggtgcttgcgggattgtagctgtgaggtcgaccagaggtcactctcatcaccatcttggttttggtagcttttggctggcttctttactgcaacctgtttcatcagcaatgtctttatgacctgtatcttgtgctgacctcctatctcatcctgtgacttggaatgccttgaccatctgggaatgcagcccagtaggtctcagcctcattttacccagcccctattcaagatggagttgctctggctcacacgcctctgacagaaggatccctgtggggtgtgagatacctaaagaaaggttcgctttcttttttttttttttttgagacggagtctcgctctgtcacccaggctggagtgcagtggcgggatctcagctcactgcaagccccgccttctgggttcacgccattctcctgcctcagccttcccagcagctgggactacaggcgcacgctgccacacccggctaatttttggtatttttagtagagacgatgtttcaccctgttagccaggatggtctcgatctcatgaccttgtgatctgcctgcctcggcctcccaaagtgctgggattacaggcgtgagccaccgtgcccagtcgaaagtgaacctttcactgggtgtggtggctcacgcctgtaatcccagctctttgggaggcccaggcaggaggatcgcttgagtccagaagttcgaggctgcaatgagctatgatggcaccactggactccagcctgagcaagaccttatctcttaagaaaaaaaaaaaaaaaaagaaaggtcccaaagtgtaggatctgaagcagcatgccccctcttccaggaaggctcaaacatccccttcctaacagattctccaaggctgccctaaaaggaaataaaggctgcgcccaaatgagatctttggccccaaggagatagatttcttgctctcatgtttgtttcctgggcgactgtgtgatggatcttccctgcatagctctctccatccaaatatgctgtcagagcctcaccaatttcaggatatcactcgagctttgttttgctggtcggaaagtgtttaacaataaaaattatcaaaactcctgtctttcaccaccgaacaccaccgctgacgttttcctcaaaggaaaagtggacttgtgtggcattattctactgtatctgtgcctccagcccctccagcctcctcccatggcagtgttaattacccaagcttaaacgaagaaggttgcaggtgggggcaaagcatgcagaccgctgtcagcacaaagcctcgtgggttttcgcaaggggaaatttgatctcgggcaaatgtcaaggcgtttttgaaatctgtgttatgatatcagctcattgccagtgtaggacttcatctgaatttcataaatattgtatgggactccctcattgccaccttggccggccacagtgcacaacagccacccctcagcacacacacgctctccatagcaattgcaatctatcgctgagttgtcatgaaaagccaattggtgatatttcaatcacaatgttcttgtaaccaattccattcaaattctgtcggaaagggagttaaggcttcatcctgctgctgggagaatgatatgctaaatgtagcttcctggggccctggcagccagccagggctttgtaatttatagttcaccttcgtggttctccaagtgaccttggaacctgcatgctggtggattttttaggttcacacgttgtcctccatcccctggtgagattgctccccaagtgagtgctccctggtccatcaggcaagagcttgagggagaggatgtggatggggggcacccagagaatgcatggctggggatcagaagatttcttgttgctgctgacctttcttctaaaattgctgtcagccaggaaacagtcaaatattgtgcttaaaggtggcttgcaggtgacaggagcctctctccagtcctagcacacagcaggtgatcctgaccaaaaaaaaaaaaaaaaaaaaaaagaggaggtacaatatgcgattacgttcatcagctatttttggctgaggaataaacaaaatggcccaaactgctgccattcgagattctagcaggggagtggcatgtagaaaagattaatgtacagttaaaacccgtgtacgggtaaattacagggtgacagctatctaatgcaaacactgcagacgtgtaattaagaggagttacagcgctcgaggatgaatttgctgagggaagtgctagggtgctgtctggagcccaggggcaggggcatggcactgggatggtgtgggggctgcagaggtggccaggaggagcctctcagcatcggggcagccttgtaaccataacaggtccattgcctgatgcacgcagcaagtcaatgtgctaagatgccaggttgcggcagaaaaagaggattaatggtaaggtcatggaacgaggagatggcagacaacctcaaatccatctccctggggaatgtggggttaggatttgtaagttttggagtgggtgaagtgtggagatcgttgatgggtggaagagtgcagggtaaagtcttgggaccgggagaggaagaagctgtgttctcaggctgatccccctcctctgtagggggtcctcaaactgttgggggcaatttggggtcttttcaacatcttaagtgaacaaaaaccttatgattctaaaatcaggggtcctgtctatagggacaatggagaagcaaatcaaatttttttttttttttttgagacagagtctcactctgtctcccaggctggagtgcagtggcgcgatctcggcttactgcaacctccacctcccaggttcaagtgattctctggcctcagcctcccaagtagctgggactacaggcatgcgccaccatgcctggctaatttttttttgtagttttagtagagacagggtttcaccatgctggccaggctagtctcgaactcctgacctcgtgatccgcccacctcggcttcccaaagtgctggaattacaggcgtaagccactgcgcccagcaaagcaaatcaattcttacaccattttatgaccctaatgtcagaaatcttacctataggagcaatgggggtgaccacggccaggatctagcaccacgtgactccttgccacaaggaactgggccagagtgcagcctgattaatgcttaattataactatatttctgtccagaacctagcgtgcaattcttgccaaccctgtggggacagtttcaatctgggatgtggtggaagccatggctcctttgggtggctcagcccacctctccaggtctgtccgttcctgttccaagcttccagccctttctggagctgccctggtctccccgacctctcactcacctttggctctgtggccttgagagcccatggatgtcttttatgtttttaatttctcctgctttgtcagctttctaaggaatatattacattatgtggaagttggatgctaacaagatttgtatgaataaattagactcttaacttttttatgttattacaaaattgaaatggactctaatgacagtcggaattaatgttctgttgccaataaatgccggggatgtgactgaatcttcagcgcactctcctcttgcatctctggcccttcctgggtggtcttgcccaagaaggaacctccctcctccttccagcgaagtggggtgctccacgacgcctccctgctggcccctgggtgatggccaaggtgctgctctgcccaggtgtgggggctgctgggaatatctgctgctgatgctcccaggggcgccccgggatgggaactgccctgggccccagggagctccttgcccaaagtcacaccccatcccaccgccagggactgctactgctgtgggatcacaaaggcccagccccttgtctccatttgggactgccctgaaggtccctcccagcaccagagcacctatgggatgggctgagtcctcagctgagaggcactgctgtcggcttctctctctgcctgctcctgccctcctcagctcctcgcaggtggctgtcccgagagcccttccctacaaacctgtctgcaccgtccatcccagagcatccaggcaactcagcccaagatcctggctcttagggacttacctgttcctaaacccatggtaggctgggtgagtcctcttctgccaggatcagagtcctcggggaacaggattgctgtttctggcccgagaccccttcttgaggtcaggactgggggtgaggcactgaccagcttctcagtctcagcctagatctccgccccaccaccccctgggcagggtttgaggagcagcagggttaagggctcccccagatctgagctgccacacctcagcttgcggtgaggagttttctgcaaggaaacttctatctccccaggggggcaaggtggcacaccggctggggattggtggtgtattggaactggttcccatagctgaagatggaagggaagaagggggctggtaaagtagggagaaggagcctcagatagcccagaaatgagggggttctggacagcccagggtggaaaatttagctacccttggagtcaggcctcagggcaaaggaggggtatggtctgggatgtcgggggcggtgtgtggggaggggggacctgctgctttggaagggggcagtgggactcccgctgtcatcgcagaaagggatgagggtttccagggtggccaggtattcacatattcaagaacacaggtccatttttatatgaaatcgcttcccctctgaagtctggagactaattcagaatttaaaaccaaagtcctacgctgaccaaaccatatgtctgtatattactttggcctctgggcctgaagaatttggagtccagaacttcactgacaaggtggatgatttccgcctggaggatgagggcctggggcctagtgtctcaccagagccctggaaagggacaggaaccaccaagaccacaggccatggctgcagggctgtggggctcagcacccactgactgtggcctttgttctgggacatccctgtctgctgggaaggggccaaagccctcacctctgggactgcagatgggtgggcgactggctgggctctgtgtgcctctggagtctggcccactcccccaggaccccgtggatgagtgggcagcagagggcccccccccactccacctcccacttccaaggaatctgacctcagcattctagcttccaccttcataagtcttttttttttctttttttctgagatagggtctctgtcgcccaggctggagcgcagtggcacgatctcggctctttgcaacctctgcctcctgggttcaagcaattcttgtgcctcagcctccctagtagctgggattacagacacgcaccaccacactcggctgagttttgtatttttagtggagatggggtttcaccatgttggccaggctggtcttgaactcctgacctcaagtgatctgcctgcctcagcctcccaaagtgctgggattacaggcgtgagccactgcgcccagccaggagtcttaaagattccctgcggaaatgcctttgcaagagcaaaaagaagattaaagtcttaccgtcctttgaatccttctggctctggtgttggcatacattgtcccagagaaggggctaccttacgtctctatcgctttatatacgtaaactcgtaaatcattttcattttatcaaaatgcaataatctttatgcctaccgcacataacctgtttaatcactttgcatatcatgaattcttttccatggtgatgaatctgtttctgtcttgcttttgacacctacacggcatccctttccatgaatttatcataatttatagaaccggttccttgttggacattttgggggttttcgtttttgtttttcaattttaaagcatgttgacatgaaccttcttgcagtatacctttgtgccatcccagcataaattcctagaagtggaatagttgtctcaaagggtatgcccgtctttaaaacttttagtacttcccaacaaatcaccttccagaaagaccaagcggtgcgtgagcgggcctattttttctcataatcacaaccgcactgggaatctttgttttttattttttaaatctgtgtcaattagataggttaaagaggggcgtgattattgcctttttaacatacattttatttttaccaaagtcatgcatgtgcatagcttaagaaggcataaataataaaaaaaaggcttttaacaaatctaccagttctctgctccctccctccccagctctcctgagcccgtgttctggaggcagccacctatgactcttctagccatttccccagcaggcactgcagttctgcctccatatttctaaataacacacatatgccgcaggtgcgaaatggccagccagttgtaccagcatcatttatggaacattcactctttgcttgctgatttttaaatgccaccttgaccatttgcttaattcctgtgttaactagggcctcttctatactcttctgttctagcctgactcttctagtcccagcacccacgattttaattatcgtagcttaggagcgcatttctagtatcttaggaggcagatcccctctattatgattcttgtgtgatatcacatttttattattttggatgtagggcgtcacatttcaaataatatctagcgaagattagtgttaggatagtgtttcacttacacataaatttaggataagtttactatttatccttacaaataaggatacattgactcctttactttatttatttattaattttttattttttgaaacggagtctcgctctgtcacccaggctggagtgcagtggctcgatctcagcccactgcaacctccacctcctgggttcaagccattctcctgtctcagcttcccgagtagctgggactacaggcacctgccaccacacctggctaatttttgcatttttggtagagatgcggtttcaccatgttggccaggctagtctcgaactcctgacttcaggtgatccacccacctcagcctcccaaagtgctgggattacaggcatgagccagtgttcccagatttactgtatttattattattatactgggtcttctgagctgatccatgtactcaacaaatatttatggagaacaaagtgtgtgctgggtgcatgtcaggtactgttctaggcactgggggatacagcaggacgtgaagcagaggtgaatcccagcccccatggagtcagtgttctggtaagggcagcagacagtgaacactaatatacttaagtatatgatggccgggtgtggtggctcatgcctgtaattccagcactttgggaagccgaagcgggaggatccctcgaggccaggagtttgagacaagcctgggcaacatagcaagactccgtctctaaaaaaaaaaatttttttttaattagccaggcatggtggtgtgcacttgtagtcccagcaacttgagagtctgaggcgggaggatcagtcgattccaggaggtggaggctgcagtgagccatgactgtgccactgcactctagcctgggcaacggagcaagaccctgtctctaaaaaaataaaaaataaatgaattatgtagtgttagaatgtggcacttgctttaaaaagccaagtaggctaagagggattggaagtgtggggttagggaggaagggaagggtcaaggtgggcctccctgagaaggtgagatgagattagaggttgggaagatgtggaccatacagatggtctaggccagtggttctcagcctgggcgattgtattcccaggggaatttggcaacagctggagacatttttgatggtcatgactcaaggatgctcctggcatctggtggctacagcccagggacactgctaaacactctacagtctataggacagcccccatgacagaggaccatctgaccccaaatgtccgtagtgtggaggttgagaaattctgacctgggtgaagatgagtgtgggcagagagggcacccagtgaaaggaacggcgaggaagtcaggagttgggggacagggcccgctggagatgaggccgtgtgggggcgggggacagagatgtgggccctgcagaacagagtacagagtaggaaattcgactttactctgtgtgcgtggggagcaatggcagggttttgaacagagaagtgcaatgattgaaattatattttaaaacaggttccctgttgctgccatggtaaggggcaaagaggcctggcagtgggagaggatgatccagccaagatgctggcagtggacgtgagcagatgggttgattctagatatatttgaaggcagagccaacaagatttcctgatgggttagatggggtgtgaggaagagatagcttttggtctgagcggctagaaggatggagtgacccacagctgaggtgggaaagagtgggtggaacagctgttggaggggcttaggctaaacattcggtgaaggacatacaggatttaggatgtccagtacacatgcaatggcagatgttgaatatttggttggatatacaagtttggagttatggagagaggttagagctggagatgttataccccaatgggttcttcttattggctgcccagaaaagccaatacacagagaagagcaggagtattacagcagaaaaagagtttagtgagggccaggtgtggtggctcatgcctctaatctcagcactttgggaggccatggtgggtgaattgcttgaggccaggagttcaagactagcctgggcaacatggcgataccccatctctacagaaaatacaaaaaattagctgggcatgctggtacatgcctgtggtctcagctactcaggaggctgaggtgggaggattgctggagcccaggagtttgaggctgcagtgaactgagatggcatcatggcactccagcctgggagacagagtaagactctgtctcaaaaaaaaacaaaagtttaataattgcaaggcaatcctggcagtagttgggagataaattcttaacctgccttcctaaaaatttggaggctagagtctttcaaggatagtttggtggacagggtactagggaatggggaatgctggccggctgtgttagggatgaaattatagggggtagaagttatagcttcttcatttattgtgctatgacagtttccgggtgggggtcacaagatcatttgagccagtttcttggtatgggttactggttcaggtggcaccagctggtccatgggaaagcaaggtctgaaagatacctcaaacactagtcgtaggttttacaatagtgatgttatctacaggagcagttggggatggtgtaaaatcttttgaccttgtggctaatttgttagtttcacaaaggtggctttagtccctgagcaaggagggggttagtttcaggaagggactattgtcatctttgttttcaagttgaactatgggccaggcacagtggctcacgcctgttatcccagcactttgtgaggctgaggccggcagatcagttgaggccaggagtttgaggccagcctggccaacatggtgaactcctgtctctactcaaaatacaaaaattagccagacatggtggcgtacacctgtttgtcccaggtacttgggaggctgaggcaggagaattgcttgaacctgggaggcgggggttgcattgagccaagatcgctcccttgcactccagcctgggtgacagagtgagactctgtctcaaaataactaaataaaaataaataaaataaagttaagctatgagctaaattcctcccacagttagcttggcctatgcccaggaatgaacaaagacagcttgtgaggttaggagcaaaatggagtcagctatcagatttctctcgcagtcgtattacaaaggtgcaaaggtggtttcagagataatacatttgggagtcatcaacatatagatagtttctaaagcctgaagactgatcgaggtcagcgagggagtgcaaatagagacacaaagaggaccaataactgagagcgggaatattccaacgcgaagactccagggagatgaggaagacccaaagcaaggcaagaagggaccagtgagacaggaagaaagcaggagactatcacgtcctgggagccaagtgaggaaagtgcaccacagaggaatgcatggtcccttttgcccaatgctggtggcaggccaggtgggtgaggaccaagggctgatcagtgggttctgcaatgtgctccaggcaagaatggctttggtggaacaaaggtctgattttggtgagtatatgatagaatgggaagagagacactggagattgtgaatagggataactcaaggtgttttgctgcaaatgagggcaaagaaatggggagataggcttggtgcggtgactcacgcttataatcctagcactttgggaggcggaggcgggtggatcgcttgaggacaggagttcgagaccagcctggccaacatgatgaaaccctgtctctactaaaaatacaaaaattagccaggcatggtggcgtgcacctgtaatcccagctactagggaggctgaggcaggagaatcacttgaacccgggaggcggaggttgcagtgagccgagatcatgccactgcattccagcctgggcaacagagtgatgctccgtttcaaaataaataaataaataaaataaaataaaaaagaaatgagaagatagctgctgagggaagaggggttgaaaggtttttgttttgggggtttttatttttttttttaggattggagaaatcacagtatatctgtatgctgatgagactgatagaatagaatgtgaaaaacaggtagttcagaggggagaactgtttgagcccagtccttgagaagcttagagtattggagctggtggatgtgggggattggccataggtagaagcacagacaattctcctagggtcaaagccgggagggcagaacagtggatgcaaatatggtcactagggtctggaagtcctctctctctctctcctctgtgtttctctctctgttaacagctttattgagacataatcacatacctcaccattcacccacctgaagtgtgcaattccatggttttcagtatgttcccagtgttgtgcgcccatcgccacagtcaattccacaacattttcatcactccagaaagaaaccctgtgctattcacagtcactccccttccttcctgcccagtcctaggcaaacactaatctgttttctgtctctatacatttgcctattctggacatttcatgtcaattgaatcctacaatgcgtggtctttttttccgcttagcataataatggtttcagggttcagccatgttgtattaaaagtactcccatctctaaaaaataaaaaattaaaaaaattaaagttgactgggcgtggtggctcatgcctataatcccagcactcttggaaaacggtctagcaattcctcaagaggttaagcatagatttaccaaatggcccagcaattccactcctgggtgtatacccaagagaaatgaaaatatatgtccccaaagactttgtacacgaatgtgtacacagcagctttattaataatcgccaaaaggtagaaacaacccaaatatccatcaatagatgaatggataaaatataataataaatgtgtatatctgtacaatgcaatattattcaggcgtaaaaaggaatgaagcactttttttttttttttttttgagttggagtctcgctttgtcatccaggctggagtgcagtggggcgatctcggctcactgcaagctccaccccccaggttcacaccattctcctgcctcagccacccgagtagctgggactacaggcgcccgcaactaagcccggctaatttttgtatttttattagagacagggtttcactatgttggccaggctggtctcaaacttctgagctcaattgatctgcccacctcagcctcccaaagtgctgggattacagacaggagccactgtgcccggcctgtctatccttctgatcacagccatcctagtgtttgtgtgctagtatttcactgtggtttgggtttgcatttccccaatgagtaatgatgtatctcattggggatgcatcttttcacatgcttatttgctacttggatgtctttggagatgtcagctgaaaaaacacatgatttatagacttagaaaggagaactttatttcttaagaaggggttcacaacctacaggccggaagcgcagcctccacctgaaaaccgaaagcaagcacttcgagggagggcagggtggaacaggaatttatgctgaacgggctggccaaatacgcatattcagcaagttacaggaagaactatgaacattcatgaggggggtctggacgcatacatactgaacaaacatgcacgttacatgcgtcccatgtttaccttgtttaccttaggtagcagactttgcatataaatgcattacagttaaaccctacatgtcaaaaggacatgaaggtattcagtgcacagcagcctctgtaaaccggccagaaccaggccatggtgggtagtctcttattaggagaaagttactgaaatcagtctcttgtccaatcaaagctgcagttatggctggtaaatcagaggggtagggggtcagttagtgcctggcggtgggtaagctgcaattgtttcagtattgtttatctccaaaccagtgcttgtttagctgctagagaaaaagaaactcctgtggcagttagagcatagtttacttttataaatagtagtataaaaagtgtaggggtgtgtgactttatccttgcctggcatggccttaggtaatgtttataacttggtgtcttactgccacaaagagtctgttctgtgagtcttatgatctctgtgttaatgttcatgctggtcagttgttgtgtctaaaccacaaaagggatgggagtcctgctgtagtcactcttaggagaggaagtctaacggtggttagcaagggagaggtgtgtgtccaacctcccgtcccagcatggccaggaacccagtttttaagatttctctgggttcctcttggccaagagggggactgtttattcagttgggggacttaggattttctttttagttctcagagactatctattcagatcctttgcccataaattaattgagttgtgagactatctattcagatcctttgcccataaattaattgagttgttaaattttttaaattatcaagttggaaggatttttttaatctattctggatacaagtttcttttttttcttttctttttctttttctttttcttttctttttttttttttttttttttttttttttgagacatagtctctcactctgtcgtccaggctggagtatagtggtgtgaccttggctcactggtactttctcctcccaggttcaaaccattctcgtgcctcagcctcccaagtagctgggattacaggcacccgccaccacacctggttaatttttttgcttttgtttttgttttatcttgagacagtcttgctctgtcacccaggctggagttcagtagtgtgattttggctcactgcaaaccttcgcctcccgggttcaagcgattctcctgcctcagcctcccaagtagctgggactacaggcatgtgccaccatgcatggctaatttttgtatttttagtagagatgggggtttcaccaggctggtcttgaactcctgacctgaggtaatctgcccacctcaacctcccaaagtgctgggattacagacatgagctgccacacctggccacaagtttcatattaaatatatgatttgcaaattttatcttgttctgtgggttgccatattttcttgatggtatcatttgcagtacaaaagttttcaattttgataaaatccaatttctcttatttttatttgtattgcttatgcttttggtattgtgtctaagaaagtctaaacccacctaaggtcatgaagattttctcctttctgttttctactgatttatgctttctatttaattttcatttctaggtgaattggcaagtattttccggacaatgttaaataacagtgggcttctcttgttctattcctgactttaatatttcaccattaatcatgattgtatctatgggatgagatcttttaaacttaaaaaaaagcgtcctatattactagtgtttataaataattaaggactcttttacccccaaatgtatttaatctatagacataaatgtgtttttttctcttttgatctatttatgcagcaaaccatgttaatatttataatatggctaatattgagccattctgtaatgcatttctgaattaaatcttaatttgttggtgtacataattatttcatcatattgcttgttcaatagccaataggttttatcatttccttgtgattctttgactcatgaattatttggatgcaaacacttcaagagcatttttttctcttctgtttttgaaaaaacaagtttctaattttattgcattgtggtgcaatgtgataaaattgcagagattgtggtgtgcatgctattgattatttaattttagtggagaattcctttgtgtcctggttagtatatgatcatttttctgtcccattatgttggaaataatatgtctcctctaatagttgcgttcagaagtctatatagatcggtacctatatacattctttaactcagtcttgtatattgtttgtatcttctatattcttaattttttttggctgcttaatttatcaacatcagagtgagatgtgttaagatctctcaatatggttatgaatttgttcattttctttgtaatcttaccaactttgactatatttttttgtaaagcaatgttattaggtgcatataggttcaagatgattatgccttcctagtgaattatttcctttttctttgtgtaataactcttttaaatcccatcaatgcttttttttggccttacattctattttaccatatattaatattacaaaacaactctgtctttgttattttgtctttggtatgttgcttcactttcaacatttctgtgtcatcatgttttgaaagtgtccctctagtaagtttagttggttttctttttttttgtggttactggtttatttatattttctctctctttttttttttttttttttttgagacagcttcttgctctgtcatccaggctggagtgtagtggcgcaatctcagctctctgcaacctctgcctcctgggttcaagcaattatcctgcttcagcttcctgagtagctgggactacaggcgcccagcaacacgcccggctaattcttgtatctttattagagatgagttttcaccatgttggccaggctggtctcgaacttctgacctcaggggatccgcccacctcagcttcccaaagtgctgggattacaggcatgagccactgagcccggactatattttttcttttttctgttttattttgtgtttcctacttaacttgctttttcattgtttctttttaaaatctatcctgctttctaaaggattgattgtatgtactttactcttgttttagtccgtctgctggtttggaagttacacattctattttttattctcccagtgtttacctttatgttgctaatatacgcacttggtttaacccaatatgatttaaataaaaatgtctactttcctccaaaacaacataatgatcttggaacactttaattctgatcatactcccatcctatatcttttgttgtctaattatagtaccatattatttataaactccccaattttaaaaaatcattattactgttgattatttcaacttacagctgtttaccagtttcttttctcactcttgcttattgcattctactcttttttgtgtgtgtgagagttctgttttcaactgcctcacataaccccttagtagttctttcagggaaggcctatgtaaactctcttggacattgttcatttaaatattatttttccctgcatagttgagctgggtgtagaattctgggatgatagttattttcctttagctctctgaagccttattcattgtttttgggtcccctctgctcctcaaagaagatgagagttagtgtgtcagtgctttgtgtataatgtctttctctctggttatttttgtgacttttctctgtttcatatttttcagcttcactgagttaactgtaggtgtatagttttatttttcctacttggaagttgaggcacttattcactcttaggactcatggctttcttaagttctgcaaattttttcagtcatcatctcttcaaatagttccttgaccctgttctcaatattagcctttgaaatgcaagtcacatgtatgaaggacagtaaagcacggtggttaagaacacggactctggagatagtttcttggatctgacttctactccaacacttaatagctggggaaaattacttaaactcagttcctcagtttactcatctatataatggaggtaataatattaccaaactcttaggttgttgtgagaatcaaataagttgatgtatataaggtgtttaaaatggatactggcacatggtcagctctacgtaaaccttggtgattaatgttctcttgagtgccctagagactctgtactgacactgacacagttgcccagaagtcattagtgtaagtgatccggaaggaccctgcctttgttttagtccctggggatgcattttggccagagtctatgattatcagttttattttggaccctctcattctattctcttccttggaattcagattcatgtttttccatgtttgcattctgggtgattatgttagattcacccctggatcaccttgtctcctagtttactaatctgttctgaaatcctagcaatgagtttttaattttaatcactatatttttcatctcttggaattctacggagagtgttgaaatctacatgcttgtttcctgtagtttcctgttctttcatgcctgttttattattttactcattttataatttaaaatataaatgttagcataaacaatagatagattagcataaatcaggtttctccctcatcttggattctagtctttctgcttgtttatcagcttgtttttcctcatggcgaatcatttcctttggtagattataatttctgtgcaatattctagggaagcaaaaattatccaaactaatttaagactgttgacttttaaacattggtagccctgtgcttcctaggttgtggagatgttgcttcagaacatttcaaaaattgtttctgctgggagcctccatgggttcatcagtttgggacttatttttcctactatttctagctccatattggtcatgtaaatttgaactccacagccatggttcaggcttgggattcttttcattctgggaggcttccccctgcctcccagaatgaaaatataaaaatattttcttttagacagggtttgagttttctaggcttccatttcactgagcccttctagagccctagctttgtgcagtaactcagttctagttcctcatcttatgagggccctgactgaatctcctgtgggcaccaatgccccaggccctgacctgtagggtctgccatctgtgttcaggacttctggggcacctgctgacagttcattgttccagctcatgcctgaggatttccttttctttcctgaagtttagctttgtatctaatgatttttatctggtcagacatggtaggtcaagcctgtaatcccagtgcttcttgaggctgaggtgggaggatcacttgagcccaggagtctgacagggtctggctctgttgcccaggctagaatgcagtggtgtgatctcagctcactgcagcctccgcctcccgggtacaagcaattctcatgcctcagcctcctgagtagctaagactacaggtgcttgtcaccatgcctggctaatttttgcattttttgtagagacagggttttgccatgttgaccaggctggtctcgaactcctaatctcaagagatctgcccgcctcagcctccgaaagtgctaggattacaggcatgagccaccgcgcccagccttccatgtccttttatttaggatttttgcatctatagtgacaagcaagatttagtctgtgattttatttttgtttcatctttggcagattttggtaccagggttatgtgttattcataaaattaattaggaagtttttctcttttcttcatcctctggaacattttaaatagcatagaaaatgtctgttccttgaaggtttgaaactgcctgaggacagtgcctttgggggtggggaggactgttttccacatatattttccattcagcttctctacttcttaaatcagtttgtatcactttgcttccctagactatcatacatttaatcaagattttaaaatttactagcagagaattctatgtggtattcttatatttttataaattttttttgcatctctacttatctctctttcttattaatgttgttttttttctcttttcttggttagactttaccagagatttgttgatttcattggccttttctaagaagcagctgtcaaatttatttattcatcctgctgttcaactcttttaaaaatcaggacttcctcctatttaatgacttgttaaggcttattttcttgttctttttctaattttttaagttgaacatctgtccaggtcatgtattatctttcttctttacgaataaaacatttaaactgatgacgcttcctctgagtacagttctggccacattccgtaagttttggtatgcataaattgtcattagcataattttttgtagtctaaaattgctcattttatttcctccttgatgcaagagaggtattcaggagggtactttaaagctttttattttttcttttgttattaatttctagttagatagtaatgtatcccatacattttttaaaaattaccatatttttataaaatctaaaatgctgttgattgtaatggactccaattattttttataccactaaagaagggaaaaagaaaaaacccattgcttattaaactgtaacatcccatcagttataagaagcattctggtttcagagatgatgtgaaaaaataaagtacatcttagaatgtgtgaaatagggagattatttgtccatcagtgtgagagcattgtggtcagagaatgtgatctgtattgtaatagttccctgaaatacattgtaacctggtatttgatatgtggtcagcttcatttttttggtttttgttttgttttttgagacagggctttgctctgtcacccaggctggaatgcagtggtgcaattatggctcactgcagccttgaaatccagggctcaggcgatcctcccacctcagcctcccaaaatagctgggaccacaggcgcacaccaccacaccgggctaattttaaaaatatttctgtagtgacagcatctccctgtgttgctcaggctagtctcgaactcctgggctcaagtgaccctcctgccttgacctcccaaagtgctgggattacagacatgtgtggttagtttttataaatgttttataggtgtgtgaaacaacgtttatctatttataatgtatcattatttatcatttataatgtatcttctatatttgctagttacaggaatatgtatatttctatgcattctatatgttatatatgcatatcacacacaggcctatgtaaaatcagtgttgaaattgtgcttttcaggtctcattgcttggttttccattactgcgctgagacctgttaaaaccttccattttgatggtggatttgttaattttccttgtgattgccactttttgctttattacacacacacacacacacacacacacacacaaacacacatatacttatacacacatacacatacacacatacatatacatacacaaacacacacgcatatacacatacacacacatatatatatacacacatacacacacacacttttttttttttttttgagatggactcttgctctgttgcccaggctggagtgcagtagcacgatctcagctcactgcaacctccacctcccaggttcaagcaattctcctgccttagcctcccaagtagctgggattacaggcacacaccaccacgcctgcctaatttttgtgtttttagtagagatgggggggtttcgttatgttgaccaggctggtctcgaactcctgaccttaagcaattcgcccacctcagcctcccaaaatgttgggattacaggcataagccaccacacctggccacacacttatttttaagggacaaagtcttgctctgttgctcaggctggaatgtagtggtgcaatcatagctcactgcatcctcatcctcctagctcaagggatcctctcacagcagcctctcaaatagctgggaatacaggcacacaccaccatactcaactaatattttaattattttcgcagagacatggtctcactatattgcccaggctggtctcaaactcctgggctcaagcaatcctcccacctttgcctcccaaagcactgggattacaggcatgagccattgtgcccagccaacatacatacttaactataaattttttagcaagtctaaagttattatctctgttatcctccaaaacaagcaaggacctttgcataccagaactgtacactgagcattctctcttgtcttccttattgttataactgagaatttttcccaccttaatacaaaaaagtatcattaatatttacagtagggctgggtgtggtggctcacgtctgtaatctcagcactttgggaggctaagatgggtggatcacctgaggtcaggagttcgagaccagcctggccaacatggtaaaagcctgtctctaccacaaatccaaaaagtagctaggtgtggtgctgtgcacctgtgatcccagctacttggaaagctgaggcaggagaattacttgaactcgggaggcggagattgcagtgagccaagatcacaccactgcactccagcctgggtgacagagtgaaactccgtcccaaaaaaacccatatttacagtagatagttaattaaatttacttataaattataccaatgttcatgtattttaaatctcactccttctctgtgagttcatttttcttcttgccaaaatgtatcctttaaaattcaatttcagggcaagccctcttagttttggatgtctgaaaatgtctttattttgccctcattcctgaataattgagtaggatgacctttactttcccgtagcactttataaaaatattatattactacattgtttcctgggcatctcttgatgccagaatgtttacagctgttctaactgttggtaagtctcttttcttcctgtaaactttgaggtttttctctttgttttgatattctggagttttaccaagattacgaatttatttttactgtttagcagtttgtgtacatttttctggaacattctcagccattatcctctcagtttattactttttctaccagaaccctgttctcttcttttaggactccatattagatgaatggggtgctttttaacaattgcgtcagattccagagtgtggatttattcatttaaacatttattatttttaatagtttgtttgactattcttcttctaatggaaatttatacttttctactaaaaacaatgctatagccaatgattttatttctctctttttgctagattctatttttattgtttcatggttaggtaatgactttttttttttttttttttttttgagatggcgtcttgctcctgttgcccaggctggagtgcagtggcacaatctcggctcactgtagcctccgcctcccgggttcaagcgattctcctgcctcagcctcccgagtagctgggattacaggcaagcgccaccacacccggctaattttgtatttttggtagagatggggtttcaccatgttggccaggctgatttcgaactcctaacctcaggtgatccaccttccttagcctcccaaagtgctgggattacaggtgtgagccaccccaaccagccaggtaatgacttctattgagatttttttcctgtagtccaatataagcccattttgctaaataatctgtaagtaaactatattctgtttgctgagcacaaaaatgtgagagggagtgccagattttgtctgttgaatccttaataatctcaattttgtttgcacaatttgttcatttaaaaagtgttcaggccaggcacagtggctcacacctgtaatccctttgggaggccgaggtgggaggcctgcttgagcccaggagttggagagatcttgtctctacaaaaaaattaaaaaaataaccaggaaaggtggcttgtgcctgaaatcccagctactcaagaggctgaggtgggaggatcacctgagcccagggaggtggaggctgcagtgagctgtgatcgcacccctgcactccagcctgggtgacagagcaagaccctgtttaaaaaaaaaataaaaataaagagtgttaaaaactttatgtgtcgagatttatcaagtccccttcttttgccctaatcatttgttttgtagacttggaagctatgttgtgagacgtacaggtttctgttcatggcagtcactccacggggctgatccctggaatcctcctgaagcttttggggacctcacaactgggccctgggctccaccaggcttcctggcccctgaggggctgcccagccttcctcacaggctgtctgtggtggcctgcagggctccttgctgtgtctgaccagccttcctctgtggatacgggccccacccctcaccccatttttatatctttttgctctttttggtggaaatttgggagggagagcgattcaatcaatgatgctagttgccatttgtaccatctcttagatcctctctacagctgctttttaaggcatggaagttcttttcctgactcctcagcttaacttccttccttagctccagcctcacgcttactggaggtgaatgttgtccattcctgcgccgctcttggaaggaaagaatgtttccagcccccttgatgccgttcgtggtgggggcagagagctggtggtgctcatgaggtaggagatgggcaggactcgtttctggtcacaaccttgctgaccaaaacaagatctggtccagacaagatgaagtgaagaaactggtggaaaccagcagatggtgatgaaagcagtcccgggctgccctcattgcccattagcataaaacacacttgccagcgccatgacagtttacaaatgccacggcaatgacccggaagttgccgcccctttcacatcagcaacccggagtttactgcccctttcctgcaaagctctaaataacccaccccttgatttgcattaacctgcctcctttcaatttcagtttgcatgcaattgaaagtgggtataaatgcatataaatacggttgtcaacagccagtgccttgggtgcactgcctgtgagttagccctgcttcacaaggagcagtactgttcaataagattgctgtctaacaccatctgtttacctttaaattcttttcaagggtgtgtgaagccaaagaccctcccaggctaggccccagttttggggcccacctgtcctgcatcactagtagcctggcctgtgtgtttggtggcctggggttggagattgggttctggagggagacttcttatgccccctcttgtctgcgaggcacggggacttggtgcactgaccggcttgttgacatgcccagcactgggttgggttgagcccaggagttcagaagaccctgtctctacaaaaataaaataaaataaatgagctgggtgtggtggtgtgcacctgtaatctcactttccaaagtgacctgtggacaagggatcccctttcctgggaagaaggagagcaggttacggatgctcagatgtttgtgtgcattgagattggacttggcaacacctgcaccttggaatattctgggcagttaaacatcactatgttatcattcagttctcacaacaaagccctgaactgaggttgagctcatgtatgcgacccagtgggattttcacccgagtcctctgtctctggtcccttgtggaggtcacctttatgggggtaacttctgtaagcaaagctccgcactcacggagcccctctgtctttccccatggagggtccatcgagccctttgcacggtggtggcctagccccccatggctgggccatcaggaaaggggtgatgcccactgcctcaccacattctgccctgcaggctgctcagttcctgcccccactgcacgggggacccttgctcctttggctccccctgaatgggcagaggagctgcctctcatctgttcttcaccagcagctcaagaggtctttttaaaaggacagtttcagccatgcacgatggctcatgcctttaatcccagcactttgggaggctggggtgggtggatcacttgaggccaggagttcgagaccaccctgggcaacacagggagatttcatctttacaaaaaaaaaaaaaaaaaaaataggcgggtatggtggtgtgtgcctgtagtcctagttactcaggagactgaggcaggaggatcacttgagcccaggagtttgaggctgcagtgagatgggatcgcaccactgcactccagcctggacaacagagtgagaccctgtctcaaaaatgaataaataaaaggatgatttcttttttttctctctttttaaaatttatttatttttgagacggagtctcactgtgtcacccaggctggagtgcagtggcatgacctcggctcactgcagcctcagcttcctgggctcaagcagttctctcgcatcagcccccagtagctgggactaagacgcgcgccaccatgcctggctactttttgtatttttagtagacatggtgtttcactctgttgcccaggctggtctcaaactcctggattcaaacgatctgccagtctcagcctcccaaagtgctgggactacaggtgtgagccactgcacccagcttgaaaggacaatttcgtacatcactccacacccagctacatccttgcctggaagtgccctcccctacctactgcctttccactctaggtctcaccttgattgtcctggcatgggggccttccatggcacagaccagggcaatgctgtggtccctggctcagggactgtctttgccccacggggaatgctgtgagggggtgcctggagtcccagcgttacgcattgaccagcgcatggtgagtgctcagtgagggttcctggaacaaacggatgaggtaaaggtggaggggcaggaggaaggaggtggtgaagggaggaggggaagaagaggagaggaaaaggtggtggagaggattgttcctgagcccagctctgggttctgcctgttcccgaacgccaacctttgctgcactgctcccagtgggtgccaactcagaatgcctgtttaagtcactccacaaaactcagcttctcaatctgttttatatttgcaagggccagatccacattccttttttaaaagtcaagcttctgagacagtcatttatattcacagtgattctcctttcaaagactgctttgcatggggcgtgtagagtcatggatcttagggactctgccaggaaaggctcagggtcacacaaagaccccgtgatggtgtctgtgttgtagaggaagaccgaggaactctccaatatgcctgggtggaggtatcttcaaatggacaggatgcgtggccggagcctgccgtccatccactgaaaagtcactttctgaagtgacccctggacaaaggatccttcttcctgggaagaacagctggttatggatgcttcagatgtttgtgtgcatggagattggactttgcaacacccacactttgaaatattctggacagttagttaaaaagcatcaggtggcccacacctataatcccagcactttggtaggccgaggcaggaggattgcttgagcccaggaattcgaaatgagcccgggcaacatagcaagaccctgtctctacaaaaaacttaaaaattatctgggcctggtgactcgtgcctgtggtcccagctactcagtgggccaaggcgggagaatcacctgagcccaggaagtcaaggctgcagtgagctgtgatggcaccactgcctccggcctgggggacctagtgagaccctgtcccccaaaaaggtttaaaaagcaggaggggccaggtgcagtggctcacgcctgtaatcctagcactttgggaggcagaggcaggcggatcacttgaggccaggagttcgagaccatcctggccaacatggtgaaactctgtcactataaaaatacaaaaattagcaggacatggtggcaggtgcctgtaatcccagctacttgggaggctgaggtaggagaatcgcttgaactcgggaggtggagtttgcagtgagccgagatcctgccaccgcactccagcctgggtgagagagtaagactccatctcaaaaaataaataaatacataaaataaaaagcatgaggtaggtccatatgcactgctgggaaagatgtctgaacagtgttgttaagtgaaaaaaagcaaaccgtagcacaatatgtacatatatacaccatttatggcaaaaacacacacaaagccacactgtatgtcctctatttacatatttgtaagttcatatctaaaagtctgaaaggaattatgccaatgatcgcagttcggagtggactggattggggcgactttcaaaggaatcttcacttccactgtattgtttgaagttttttcctgtgagaatgcattcctgtgtacttgtgtaatttaaagagatatatggatttagaactgggaatctatatggtttaccctgagcttctgggattttcttttttatttatttatttatttattattattatactttaagttttagagtacatgtgcacaatgtgcaggttagttacatatgtatacacgtgccatgctgatgcgctgcacccactaactcgtcatctagcattaggtatatctcccagtgctatccctcccccctcccccctcccccctccccacaacaggccccagagtgtgatgttccccttcctgtgtccatgtgttctcattgttcaattcccacctgtgagtgagaacatgcggtgtttggttttttgggattttcatttttatttctttgagtgattatgttaagtggcttacccaaaaaagttcactggacatctcaaaaggttatttgacagatgatttaaaaaaaattatactgccatttttatgcatgtgcttaaatatctcaaattgttttctaaaattggttgggaatatatttgcttttttcccccctttatcttgccccatccccttcccagcctctggttactgccaatcttgtctctgtcttcatgagatccaattttctggttcccacgtatgagtgagaacataatgatatttatctttctatgcttggcttatttcactggacataatggtctccagttccatccatgttgctgcaaataacaagatttcattctttttaatggctaaatactattccattgtgtgtatgtaccgtattttctttatccatttatccactgatgggcacttaggttgatttcacatcttgactattgtgactagtgccgcaataaacgtgggagtgtagatatctttgtaatacgctggtttcctttcttttggatatatacccaggagtggatcatatggtagttctatttttagtttttttgtggaatctccatactgttcttcatagtggctgtactaatttacatccccaccaacagtgtacaagagttcccctttctccatatccttactagcatctgttatgccagacagactatttataagtgaattatatttgtagtttaggccagaggtcagcagactttttcgtaaacgaccatggagtaaatattctaggcttcatggacaaaaaggtcactgtggaagtcactcaattgccatcataatgtgaaggcacccacagatgatacagaacaggcgtggctgtgttccaataaaactttatttccaggaacaggtggctggagggtgtggtccatgggccacagtttgccgaacactggtttaatggattgcaagacacagatgggtatggaaatggaggaagatggcaaatggaaatgtgttggacatttaatcagaactagcatgtcgaaaggattgtttgagtatcttcaaaactgaaaaaaaaaaaaagcttttctcaagtgcaatcctgtagcctcttcctgctggaccagggtgaggctggggccgcagaacccaggagcagtgtcccccaaggaacacttcctctgtgactcctgatgggtagagggtggaggggatgggcaggccttcctcaagcctgagtttgcacatggttcacactcagtgggcatccgggaaagtgatcagggccccagtggcccacccagctctgggcaggcagcagacaaggtcagactggggtggacaaatgacaaaatgacatcctcaggtttgggaggggacaagtggtgtctctgcagctggaggccgaaaggcaggcctctggctccgggacggggtgtcggaaacggctgtgccccacacagctttctcgtggatcatgtctgtgcaggtgccttggggcctgagaaagaagcaacgttggctgcacaacaggaaaggcccattagtgcctgtcgatgtaggccacgctaattagtcacgtggctggagatggagcagtcttatctggaactgagcccttcatgccccacaggactgtgaaagtcagggggtacacatagggaagatgggctttcttctcccctccatgcccgtggaagccctccaggctgagtgtgagcatgtgtgtgtgtgtgtggaccctgcaaatagatgtggcagagaaacagtcactagcagacaaggactccgctgtctcctcctcccagcctcacggggagaaatctgtctgcctcgcgtttctagagtcacagtgatgacaaaaaggaggcagagctcacggatccaggaatggggttacgcggagaccagcagagttacactgcagagaagagaaggaaccggaaggtgggagggtctggggcaggtggccgatggagcccagaggctgggcatcagggaagagggtgccgggagaggtgggagagtgggaggagaggggtattgatggcatgaccagtggaattcctcttgttagtaagatttgaagatagacttaattagagagtagttgttaagtggtatttttctttttctttctttctttcttttttgagatggagtcttgctctgtcacccaggctggagtgcagtggtgtgatcttggctcactgcaacatccgcctcccgggttcaagcaattcccctgtctcagcctcccgcgtagctgggactacaggtgcacatcaccatgcctggctaattttagtatttttagtagagaccagtttcattatgttgcccaggctggtcttgaactcctggcctcaagtgatctgcctgcctcggcctcccatagtgctaggattacagttaggtggtatttttctgaaagggaccccagggatgccaaagccagcctgggggccagcccctgtgtgatcacaggcgtgtgtatgcatcgagtgcccatgagaaggcacctaggtttgcacatagtgaggctgcagccagcatcaccccatcttgaagaatggggtttgcagatggagggtgaagggcacattcatcccctttgcctgtgtgctggccaacagtggtcagccacaagtggatgttgcccagagaccctttccttgggtctaggtttcgctgtgggaagggaagtgggagaaataacgtaggagaaagccttcctgcagccccaaacggaatttcctcccctgcttgaagtcagatccaattcacaccctcgcgcagcccgacggctggcgctggctctgtttggtaacatcgcagcaaacggccaccttgtctctattttggttcttgctttgccacttctctctgcacctttcaagaagtgttccttccttctggaaggctggggtggcaggctcccccagctccttcccattctggtaaattaaggaacaaacggtgccaaattgttcttgtctgttttgcgagatgattcgtaaccagcttgttttcttttcctccattgagcgaatgcattaaaactaaaattaaatcattacccgcagcacagacgacactccccctcataattacatcctcttaatgggcatttgagagcccagctcattttaatgcttgctggaaaacgtctcagacacatttatttatttttttttaggtttaaaggtcaacaagaatatcttaccttaatttgacaagtacgcaagaaataatgcaagactcgtttatgttcaggtaatgcacaaagaaatctataaatcaagctgagggaatattagatgatgccatatcggaaccatctgccttcattctcggaagaatcgataccacaaagaaagcgccgaagacgtagatttatgcccttgtgtcgggggaaaaatatcggctgtttttagagtcacttcatatcctaaaacaacagggcctgaggaaaagaatgagagtgggcctaaccccgagtgaatgcgtcagacagcacatctgacactcggttttcgattgtctctgctggagaaagaatggtcccaaggtcctttcatccccatgactctgccccgtctgctattgtatttatttgagaggctgccaggaatgttgagatggcgtggaagggaattaactaaattgcatctgtgtgattgttgccagggggtggaggcttgtagagctcggggaccctgggttttccatgccatgcacactgcctaacactctgccctccttgggagagccttcgctggccttcatcatggagctgggggaacatacaacctccaccatattggatgttgggcttgtccaaagatgtgtcaaatgggaagagctgtctgggctttgtgaggggggaaagatagcctccgagcaattagggtttggaaaaatagggtaatcatcttaccacctaccccagaagtggtcatgaagagcagcagctctccagggaggtggaagggaggaagaacagatcaggtgaccctctggcaagtgtatgagaatctccaaggagggaggggaagagttgtaagacttgaatattgaataattggagaggctttttttgtggggggcttcaaaatataaagttatatttttataatcaaatgatagaaataaaggcttttcatcttttcctgggggtagagcgctgcagaattttgaataaaagagatttggagattctgagattttgcttcgtgacactcgtattaggatatatggactctcgtgcgtgtgtgtcgccatttatactgtggttcccatcacgggtcaaaaacaagcattttctgtttgaacgtgaggatatgcttagaggaagaaagtttgatttttgtatttataacagagtagcacaaaaatgggtccgtgagcctcgggaaacgtatttgtgttgcatccttagttttatcctttcaggagttgaagttgcttctaatgttatgagagggaaatcaaagggcccccgctaagcagaatcgttcccatcagccacaggcaccagtgcactgtgctcatgaccttttgtgctaaacaaacccacagacacacatacgcattcctgcttcttggagcccgggtgtggatggatgcctgacctgccccatcaccctttggctactggccacagagttcacattgtcacagagttcacattgccatctacaaaccaaacatgaacattaggactctcgtttttgttttctttgtcccttttgggtgtagctgaaaatgatacttgcagctcatatcaaagatggatttatgtctattgcaaagatggcgacgtgcaccttcctggaggtgctggcaaattccaggcagtgaagccaaaccactctcgtgccttaaataatgttggatcaagatcatgtgaaatttattctaaaacctgtggtttttatttcttcctgcaaagctccattctctgcttcacatgagagaaattagcaatgaagcacctcgtcaggatccaaaacgcctgccacccatctgtgcaaaaccctggcagtcctggaggagacaaatcctcaccttcctggaaaacttccatgaaacctgcagtgagggcagccagaccttaacttggcaaagaaactgtgaaggcagcctggagtgccaaactattaacttagtgagggtggcaggcttcaagttttgcagaagcccaaatctattatttaactattagttgtgatgaatggatgatgaagggaaccaacgtagatatgcatgaggcatggccgaagatgatatcattgaggaaatgctgttttcttaagctttggtgactaactatagaattgattatgtctttgaactggagtcaaatttcttctaagtgagccgaattggaaaataatattaaacttccattaagggtgttccagaaatgccgaattcaagacaaggattgtgtgcgtttctgtgtgtgtgaatacaaggggaaaccttacagatatttgcagaatatactccatcatttcctgccaagcatcagcttctagtatttcgccaagttttttagaagacttcaaccttgttagcaaagtaattaagcagaaagaaagaaaagaaaaaaacaaaacccacaaaaatgaaaacaaaaccccaatgcattgagtgccttgctgtttttctgattctgtgaagttgaatatcagtgaattcaaattgcacactgggttcttctgatatgaactgaaattgtcaaagatgttgggtgagtctatgggctgaagtttaccgtatttttaatcatctgagaaaagaccaactgcaccaaactttcaaaattgatcattctgaatagtgcttggcatactcagcagacatgattgaaatagttttgcagacacagcgtaaacataaaataccaaccccatcacctgtcctgacacacaccagcagtggtagcccagggccagcgctggctgcagaggcatggtgccaagatcggctgctcattttcccttcttgatgaatgcttacgggccagtttctggaagccctttccaggagcgtcacatttttctgtgggtctgcctgcagcccgggctcctgagacatttcctaaagacctccattagaagcttccactgctccccttactggcaggcgttcagcctttgccaactgcaggttgatggaattgtcggagagagagcatgtcggggggctctgttcatctcccctaaagtagtcactgacatgagcaacactccctgtatgccaggcactgctcccttattgcccattttgtcctcgtaataatcttgcaaggtagccacaagagattattactcccattttgcagatgaggaaactgaggcatgaagaggttaagtagcctatgtagctggtaagtggaggagccagagtctggaccccggcatcctggcagttccagcctccttctcccagtcatcactgtatgttccattgttccgtttctatttcactcacatataacgagcagctaagtttcctgagtttttggatatgacaacaagcagcgggggcccagcttactgagaagagtgaattacagttttttcaagatccagaatatccacatcagaaaagctcatggccggcaagtgtgatatcaacacacgttgatatcacagcatcaaagtaaaaactatgtaattttcaacatccaaataaagccttctttgaaaagcaccgattttcacatgagaatggtggacagatttccacatcctggcccgagatttctcaccgatcctgttgctgttgtctcttcccaggccaacctgtttctgcctggcctcttcctccaaggccaagaggggtcctgccaaagtccaggtcagagagtgtcctccctctgctcctgtctcattcagagtcaaagccaaaatcactggagtggcccacatcactgccccccattgcttctctgaccatatcttctttcgtgcttctttatgtctctccagacacactgggtgtcaagagtgctgtcaccccagggcccttgcacagctgattccctctataacccttggttcacatgttgccttctcagtcagaactcctcccacatactcacctttggcctcaagctctcccagtcctcctccccctactgtgtttttcttctgtccttagtatttctcaccctctaaggttatatataatctgcctctctcctgcttggagtggaattctatgagggcaggatctttgttttgttcatgaatggatcccagttgcctagaatagtgccaggcatgtagtaggtgctcattaaatatttaccacatgtgtgatttacctccagaggggaggagggttgcaaagggaaccccaagtattggtaattgttttattctttaagcttgggtgatgaatgtgctggttcttctttatgttatttacctgtatgtatgtgtatgtatgtatatatatgtgtgtgcatatatatacacataaatatattctgcatatctgaaatgtttcatattaaattttaaaaaatcaaacaggatcaaaaagtaaaagaggtgtatggtttatataagtggtggaatcctcttctccattgaaagtatttcttttctttttttgtgtgtgtgtgtggtggggtatagagtctcactcttttgcccaggctggagtgcagtagtgcaatctcagctcacagcaacctctgccttccaagttcaagcaatcctcctgcctcagcctccccaggagctaggattacaggcgcacaccaccacacccagctgatttttgtattttttgtagagatggggtatcaccatgttggccaggctggtctcaaactcctgacctcaaagtgatccaactgcctcggcctcccaaagtgctgggattacaggtgtgagcccctgtgcctggcccccatcaaaagtattttttcatctttgtgtaccatctcatgtcagcgacggaaagtgcaagttcttaggcagatgtgtttgcgatgggggaagatgcggagaaacaggaagaaaagctgggcagggactctgactggccgggcagtcggggcccacacaaccagaggagctgactgtcaaagcaagagtgttggggaacgatgagaaatgaggtggagagttagccaggatgagacggccctgggccagcttccgagagcaggacgcttggcgtggatgtctgaccacccttggcaggggagcctgcatctctctgacagaggagaggaagaaagagaaatgacattttctgagccgccaagaaagaagaggcctgaatggggaagggctgagttcagggacctggatgaagacatcacgtggggtgacgctgtggttgaggatggacccaggcaggacgcgcccaggtccaccactccctgtgaccccatgagattccccaaatcctcagaaggggagacacttcctgggtttgcaatcacctccagtttatgtatatagccagaaggagtaggagtccagatgtggaacctctgacccagcccagggctgtgtggtccgtgggcgaggtgagctggccaatgtccgggtgtcgtggctgggaggacacagctggtccccgtgcccgccaagcagcttcccagatatcgatcagtgcctctggtgagcatgactccttctgaggagtcccattgatcaggccagatggaaaactagtagctgtgattgggacgagtgaatattcatttggaaatgtcaatgagtaactggagatgatgcctgcagtgacttgcctggcaggatcaattccagacatgaggtgaaccagacgttggcggggacctaaggtgggagccagggaccctgggtggggcagggggagtggtggaggccagagaatgtgtaggacagtgaggtcagacacatttccctgcctccccacccccagttctgaggctctcttgtctgtctggggcttttgtcttcaagtgtggcactccttgcacagtggccaccaggccggaggacgtctgtgtgtgtgtggaaggggttgaagggtcccaggacgtgcacttgctggaagaatgcatgggtctgctgaacctgccttcctcctgggcatgctgggaggaggggctgcaagaaggtcaagctggaggggtctctaggctctagctgagacccttctcccactttttttttattttttattttgagacagtctccctctgccgcccaggctgaagtgcagtggcatgatcttggctcactgctacctccacctcccgggttccagcgattcttctgcctcagcttcccgggtagatgggaatacaggctcgcgccatcacatctggctaatttttgtatttttagtagatacggggtttcgccatgttggccaggctggtcctggactcctgacctcacgtgatctgcccatcttggcctcccaaagtgctgggattacatgcataagccaccgcacccagccttttctcctcacttctgtcagtaggtcccagctgtgcacaagtcagggctggggccaggggaggctaggagattttggttagggtctccttgcactgggatggagggatggagggattcagccacttcaccccaggagctctggccctggctagaggcctcctggacagaggagggaagtcatcgctgctggcctgtgaaggggccctgtcagcttattgccaggtgcactgtcacctaggtgtggcctgctacttcccccagtcccaattaaccatctgcaggagctgccatcggcatgggggaggggctgggtcccactcgtctgtacagactgctcagctaatgagggggtctgtgaaatttttaattacggctcccatgcctggcttaattatttgcatatggcttttacaagtgggaaaaggacgattgcatgcagcgcagcacttctcctcagccccacgtttgactttaattaaaggcagaacctgaggtctttccatcactaatgatcgtggaaaattagcttccaattcccaggggtctccagagtgatgcaccctgaggcggagagcgggcggagaggggatggagcagggagaggagcgggaggcacagatggcagatggtcctgctgggccgccactctggagtccccccaaccacaggccaccctcccaccaccttccctccaggctgcgtagagaagggagcctcactttcctctgccaggaagcagacctgaccttgggcagcaactaggaggaagacctgctgagctggggtgaaggttgccagggtcattctcccgttggccaggagctgggtgtgttctggctgtagctggactgctcccagctggtggccacaggcagaggagtgggagtttctgaaatgagtatacgtgtgtgcacacatgtctacagcatgtgctcacccaggcacacagatacacaggatggagccgtagagacacacctgcatgctcacacatgtatgtgtacatatgtccactcaggagcaaaggagtgaatgtgtagtgggccctgtggccatccctgtgtccccatccctcttgtctcctactcactgagctgggaggagctgaccccagggcagtttcatcccgctgtttccagtagccaggcctgcaccacccccagcacagagcatcccctcagccccaggcacactaggtcaagaagttctattggctcaggatccaggggcttgttcccttgttgcggatggggctccctcccttctactggacataatgaggatgcctgtagcttggactatgtctgtagccattgaaccatgaagggagctctcaggataaaacctgccccaaggacaggagcagagccactagcagagcctgggtccccagtgacactgtagagcctcgatttccctgatgagctgggttttctgtttctcgcttccaaaaacatcctggtctaggcagagtttgtgtccaatgcgtggtctcacactgcacgtggttgatggcaaccactgaaccacgcaagagctggtttcctggcaacaccccagcctccttcctgccccactgaggaggctgccctgtaggtcagggctgagccttcctggcacaggggctgaagtcatcagccagggctgccgtaacaaagtccacagactggggagcttgaacaaccatgtttaggtgccatctggtcacagagctgtaggaaccagcttctgaccagtgaggctgtagcagcctctcttcccagaggatttttctccctcagctgattttgcacaaaagtccttgaaccgggaagcattgttctcatccaggggtcacgtgcctttccctaatccaggctcccgggttgggggagctccagagtggcagcccagcaggaccatctgcctttccccaatccaggctcctccttaagcctcatgtccattctggatttggcctgaggtccacccattgcctcctctttcattgtaggaggctgaggcaggaggatcacttgagtcctctttcattatagagggagcaatgggtggtggacctcaggccaaatccagcatggacataaggctcaagtaagtttttttaaatgtgcattgcttgccaatttcagaatcaggaaatttcaagttaaaaatccagtttccaaattggaaggtctaaaggtctgcattgctacaagggtcatcagatgtgtcatttaaaaaataattttgggtccagtgcagtggcttatgtctgtaatcctagccctttgagaagctgaggcaggcggatcgcttgaggccagcagtttgaggccagcctggccaacacagtgaaaccccatctctactaaaaataccaaaattagccagacgtggtggcacacgcctgtagtcccagctactcaggaggctgaggcaggagaatcacttgaacccgggaggcagaggttgcagtgagccaaggtcgtgccactgcactccagcctgggcaacagagagagactccatctcaatataataataataataatttttgccccggtgtgatggcttacgcctgtcattccagcactttaggaggctgaggcggaaggattgcatgaggccaggagtttaagaccagcctgagcaacatagtgagaccccatctctataaaaatttttgaaaattagctgggtgttatagcatgtacctgtggtcccagctactcaggaggctgaggcaggaggaccacttgagcccaggagtttgaggctgcagcgagccatgatcataccactgcactccagcccaggtgacagagcgagacccagactcttaaaaaagaaaaaaaaaaaaagaaatccaggtttccaaataggaagatctgaaggtcttgatctgctaccaagggtcattggatgtgtcatttgaaacataatttttattatgaaagtgtcttgtggttattataggaaatgagctgcttcaaacagctgctcactagagaccaatgactgacattttgagtcccactataaaaacgcctgtcttcattcctctttagagcaatcacataagaagtcagggctccagcaaccccttgtgtgatcagccggcaggggggggcactggggcatgagtgtggggtctgtgtggatgctcttttgctttaagatgctcccagttagccgagtgctgcccacatccctgccccacctgcccctgcctggcagacagatgccacagagccccacgtacagggatcataatggtttacacctcttctgcctgtgtccttgaggttgagcgatgagggcatgtgaaacccaggatggtagaaaagaggctgcaggcttagggaaagaaaccagagaaaccagactcccttggatgttgttcaagataagcaaataattcagcagagccatatggaaagatggtgagaccggccgtggaggagcaggcaccctgcagagaggactgggacccagcagcccattccaccagacccaagcctgttcctccaccccagggcagcatcccaccactgcaggaatcttctcaaatagctccatggtaccagtccaccaggggcctacttactggctgggaaaacaggagcccagatacatagcatgaggatgccccaaatctcccagtgacaacattgaatgctgagtgctgtctcctctgtgttactctcccacagtcccctctgtcagataaaagccgttagtctctggaacacacaggagggtgcctcacttggcctgggggccatcaaggaatggtgagagatgagactgggcacgggaggttggcagaggcaggatattcacagatctggtggaccatgctgagacattttaacttgggtcactgggcacctggggggcttgggagtgaccacagatgtattgcaggacaggtgttgagatggggagctgtccaggctacaggtgctgaatcagagccgcaccgagggactgggaaagaaagacaggacacatgttcagaaggccagatctgcactcaggtgtcaggagagggaggaagtgttagtctggacccacatttctggctttccaacactctgtggggaaaaagaagggcaccaaggggtcactggggtggaggagacttggaacacaggacgttagctggaaggagatctgaggcagagactaatggagaagggatgttcctgtcccatgcacagtcactcattagtgcttccaggtcatttgaagccccagtcacttcctggtggcctaaatgagacctgtttttccacagagcatccaggatagggccaagagacttttgttctgccatattcttagtcttgagccttcacattgggagagaccagcctgttttgagatgagctccagggaaaatcatgctggactggtagaggtcaagactgtgagggtttacctgtaaacccagtgctttgggaggccaaggtaagaggattactggaggccaggagtttcagaccagcctgggcaacatagtgagaccccacttctacaaaaaattaaacatttaaccaggcactgttaaattgagtagtcccagctactcaagagtctgaggtgggaggactgcttgagcccagaagtttgaggctgcagtgagccatgattgcatctctgcactccagcctgggtaatagagtgacaccctgtctctaagaaaataaaaataaaaaaagatattggaggttaccctttggaagccagcctccttccaaagggtatggccatgcttgtgtgctgagtggacccacagagcacaaccactggactccacatgaccccagcccgaaggacccagctggctccagtgcaggagcttcctttcaccttcgttgtccttttactagcttctcttcattcgccacacattgcccaagcacctgctctgtgccaggcactgttggcagctggaaacacaaagacaagtcctctggggcctccttgtgccagccacagggagagagattccctggaaggcagccaaggcttcttgccattctctcctcagaagtctatggactgccttgtgtgtctgcaccctgccaggggccagggcatttcaggtttactcacagactcctctctgtccatattataccccaactttcaattttgagaagtaaatatgcaattttttcctccctgtaattttccctgctgtggctgcggatgtcagagccgctggaaaatgtgaatagctcagtgctttctagaactgaaaggaagctggccatgccgcatcctacatccccaggtgctcttggcaggatccagcagctcaggtggggagagatgctctccaggctgtactgtcgagggaacttttaacccaaataattcatgttcccaccttcttccattagcaacgagataattgccaagaagtaagtgtgtatctgtgtgagtgtgcacacgcatgcgtgtctgttgcagggacattagcagaggaggcgaagtgagtgtatttgcttatgcagccaaactttctgcgtgttcctctggagactgtcagaccttcgtgtctcagtaactgaaggtcaggacagtctgatctaagcttttgttttggaaaagcatggctggggtggagagagagaggatttgagtcagatctggggtggcgcttatttcttgtgtgtaaccttggccatatttagtctctctgggtcttcatttcatcatctgcaaaacagagtggtgggcttggagatctgctgcccagatcttccttccaagaaggatttgctgaccacctggggactgtgtgatcagcagccagcctctagtcctcaactccacgaggggctgcctcatctgagatcacgcccttctctgggcaacccacatccagctactgagtaagggggaggtgtaagggtccagccctatcttccttctgcaggacactccgacaggctgaatccactccggagcccaccatcaaggcctacatccctattccacttcttcccactccagcttcctcccttttccctttgcaggtattgatccttaataaacattgtgcaccccaaactccatctcggtatctccttacagagaaccaaacctgtggcaaatagggataatgatttttacttcaaaaggttattgtgtgaaagctaaatgggatgtttatgtagtatccaacattgtgcctggaacgttaacaaataatgataaatacctgttcctttttcttttctttccctcacaactgtgactcaaaatcccattctgggcctcgagcaggtgttcctaacctgtgctctgtaatattggtttggaaaaagcccagcaaggcaagtggccctgaaaatctgtgctgcggctaaatctgagatcctggctgatggcttcagagccaattcttgtccctgtcaagttcattatccatggatcacgtcagccctcttcaaggttcctcactgaaaagaaattgagcatgcaaatactcttttatcataatcaccacgtatccacagggtaattcataaaagagctggaaatatgttgaaattcaatattgttttagtccaaatcgatattaataattgtttgcatttttaaagtgcaatttgcaattgaaaagtgcacaaagatcaaccagtagttgctaacacatcaaattttcctattaaaggcacagtcccttaactttaaaatgtttcttatacaacaggggctggagctgatccatggaaatgactatctcttatttacgtgcacaacattagaattggcttccattctgcatgagctgaaaggccagtcacttttatttgtaagttttgatttctttaattaaatttttaattttgagataataatatattcatatacagttgtaagaaataatgcagagaaatcccatatatcccttacacactttccccaattgtaacggtttgcaaaaccgtagaacagtattaaaaccaggatattgacattgatacggtcgagatagagaacatttccttccccacaaggatcctcgtgttgctttcttcagatctttaaaaattaaagatttttgaaggaaaaaggaccctgttagatttctgccttgaaacgatagctatcactaaatgaggcactgtcccagctgggctcagtggagttcacacagaggaatggtcccctaggtcaggagtagcccaggtggaactcacctcagccagggaggcctcaggggagcacagctttgcacatcagaaagaacctgagaacagttttcagtttgacacttgcagtgtggcctttgatccctcaaacaaggacagggttgtcaagaagggaaacagcttggctgggctcatgtgggccacaggggcccagttatcccaggaacagggataactgttccttcctagagtgtagaactctggggcacagccctggcagcctccctgaggacatgtcatgggaccaacccagttccctggtgagggacaggcggcaggtgtgggtgaggggtgcccttgactgaagcctacctggcatgcttgaaagtaaccctatgcaaatgaaattcacaaggtgcctccctgtttcaagacatttgtctcacaccagagctgcagggaacttgggaactcatctacagcaggtattttggatgaggactgattctgagatagggaaactcaagtcctgaagatcagacttaagtggaggggaagtcaggccagagaacctggggtgccctgctctgagcctgatggctaccctgtgacatccagatgccttgttcaagctgcttccactgagggttttgggttttgctttttttttttttttaacggagtttcgctcttgtcacccaggctggagtgcaatgtcatgacctcgcctcactgcaatctccacctcccattctcctgcctcagcctcccgagtagctgggattacaggtggctgccaccatgcctggctaatttttgtatttttagtagagacgggtttcactgtgttggccaggcttgtcttgaactcctgacctcaggtgatccacccgccttggcctcccaaaagtgctgggattataggcgtgagccaccgtgcctggtgtgtgtgtgtgtgtgttgtggtttttgttgttgtttttttttttttttttttttttgagacagagtctcgctctgttgccctgactggagtgcagtggcgtgatctcggctcactgcaacctctgcctcccaggttcaagcgattctcctgcctggaaaacaggcatgcactaccacatgcagctaatttttgtaattttagtagaaatggggtttcaccacgttggtcagactagtctcaaactcctgacctctagtgatgcacccagttcataatcatttttaagtgtacagtccagtggcattaattacattcacattgttgggcaaccatcaccactatccatctccagaaccttttcatcatcccaaacagagactctgtacccattaaacaactccctgttcctccttccagtccctggtaacctgcattctactttctgtctctatgaattggactactcctggtacttcacacaagtggaattatacagtatttgtccgtttgtgtctggcttgcttcacttaacatgatggcttcaagagtcacccatgttgtagcatgtgttgctatcattgactttttgattgacacatgcaagctgtaattttttgggggggttcctagcatcacaatatattttaaaggtttggggatgcattagtccacttttgtgttgctgtaaagaaatacttgaggttgagtaatttataaggaaaagaggtttaattcgcttgtggttctgcaggctgtacaggaagcatggtgttggcatctgctcggcttctggggagggcttcaggaagctcacaatcatggcagaaggcaaagtgggaggaggccggtcacatggcaagagaaacagtgagagagagatgagtggggaggtcctagactcttttaaacagtcagatttcacatgaactgaatgagaaccaactcatcaccaaggggatggcaccatgccattcatgagggatccaccctgtgattcagtcccctccaaccagaccccacctccaacactggaaatcacatttcaccatgagatttggaggggacacatatccaaaccatgtcaggggacaatcagtcaattttgtggcatctcaatggtgtgtgtcttttgtgtaaacattgcacctgttaatgtgtatgtatatgtagagggagaatcaacatttgtctttaaaagtgtatttgtcttcaagctctgtgatctgaaatctgtcatactgacatgaggaggcaaaagtgaggtcctggtggcgagcgggcctcgggtatttcaagctttaaggctccactgggctccctgggggccgtttcttccttgcttcttccttgcctcctgtcataggattgggctactctttggacctgattccaaggcagctctgaggaaaacaaaccctcagctccctgaaacatagatgacctttttaaaattccaggttcatggagtgcctctctccagatggccccaaacacttccatctattaactcgtgctcattcaacgtgcagcagaggctattgatcaccttccctgtgccggggactgtgctaggtgctgggaatacaaagatggggagaggcctcgatgcgattcccgattcagaggcaggtggcaaatgcttttcccacagtgagggaagggctgtcaccgcgatggtgctctcagggaaccaaggttcacacattcagggaattcggggcactgagtcagcattctagactctgccaggatgaggaggagcaggggactcagtttctttacatgcagaatgactgtcccctgccctgccccactggcataaaatgtcctcaacatgtaagaagccctgggcagagatagtgtccagggtgtggtcagttgacgtggcctgtcagtctttggccacgctctcaggcccccctcgctgtggctgtgtgtttgcaggcgcccctcagactccaactggaatgtgtccgtgatggtgggaggccgggctgtggtgctcctagtagggctatggtggcaagctttaggaccttgtgagcctgattcacccggtaatctccacctcggaacgccctttctccccgctgcagagcatggggctgggggggagtggagagaaccctgccttgtaacagggcagcggacagcaggtaaattgccttccccgggagtagcgtgccgcccggcaggggcctgggtgtgccaaggcccggctctggggatttcaggacccaggccagcgctccccagcagcagggcaggaggcagcctgagagtcggcagccccgccttggagtctgagcactcgcgcccatccgtcaaccttgcagagcattgcaactttatgcctacgcataaaaactggagggactcgtcccagagtttgctgccgccgccgccgctgccattagagcggttttaattagctgcaggatttttaatgagctgaaatcaagaagagccccatctcagaagtaagcgagagccgcgcgcagggaagaactagtctgacaaaacagaaggaggtggtgctctcgggggactgggctgtaggctcccaccgatcgatcggcgacgagcagatgagttcccgaggccaggaggctgaggagggaagccagggctcagagaccagcgcccggtgcagagtccccgctgctgccaccgcggcagaaggcacggtgccggattcaaggtgacggcagtgcctggctccattctcctcaagttgccatagcagcctctctcccaacaagcagcttctccgggagccctcagccgggagggacgtcattgttctctcctgcccgtgtggtgcaaggagacccaccggacagagaactttcccgagcccggggtccgctgaccacgtgggtgcacccatgctgcctggagccaggcacagggacaggtccccacggccacagggaatcctctgggcagctgaggggagcgtccaggcccagaagcagctgcagccaagcgtgtccttggagccgtccatgcgtctgtccgcctgctgccggtcgccactggaggtgcgtgtgttttggctgaattcccaagtccttgcttgtgccctgaagtgaatttcttcaaagagacacatttttaaatcaaataaataaggaaatgggaggaatccttcgccctgccctgtgtcccaggaggggtttataagattaattggatctttttttttttttttcttaaagtaaaaattggtgacgccattcaggcctgggggagaaaagccaccaggaggactaggaattgtgaggccaggcaggagctgctggaaactcgctggggctgtttatttttcttgcctgaaccctccctcttctctgcccctggaaggctggattttcttattgtctgttggtcttgggatgggtgtaagcaggtgaaggcaggttttgcccttgtcatcggagctgagagtgatatagtctgtgatgaggatgggacagtcccaggtggaggctgaggcctgtgactgtgtttatgcctcatcccccagccttccaggccccagcctgtgacagatggtggtgtccactccccaggcagcagctggactcccaggagagggagacagacagctcttagaccagcagctcctgttgccttgaaaacaacgtgcgacttggaagcctggggtcctccgaggaacaatagaggattctacaccccctggaatgcccggggatctgtcggtgaccaccctcccttcccacaccttaggggaaaggagtgttctatagagtccagttggccagccatactgctggccagttacccaggaggggaggcacgctgaccttttgattcctgtttgcacggagcagggagttagctggtcagatggtccccagtgagaacaaacacagagctgagggtcccagagggaaaagctggggtctgaggcttaggggctaaaccctgaagccacagacggctccaatgccagcttccctgggtatagagagagggtgttcgtgttctctcgggggccagcaaaggcagggtctttgaaaggggaaacgtgaacagatgaagctccaccaccatggaggtgtggtcctgggtctgtgtcttcttccccttcctggatttgggggcatggatctggtccttgccctggctcccaggcacatgggtggctggagccaggcatcatggggtgggtttggtttggggcggttcagaaacaagtgaggacaggtcttcgctgcagacccatttagtccttgacagtggatgtcggtactggctcgaatggagacagactggggagaagagaggaccggccagctctcttgtaaccactctgcagcgccagctactgaacaaatgagatgatgatcacacatgctcccgagtcccctttgttcatcaggtagagcctgatattgagggacccattattagctgttttaccaggcagttctgggcgctagccatgaagctgttctccttcctctctccctccttccaaaatgtcttgatgttggaggctaccctaggtcaaactggcttcccggtgtctgactcaggaggctgcaggaagcgcacccacaccgtggccagcttactcaggggctcgcgacagttgctttccagctggggccttgctggggaccatcgatggtatgtgtgcaggcactggccggcatgcacccgggcatgtatgcatatgtgtgttattgaacccgcgtctgcttaggtccgtgggtgcggtgcacatgtgaacaccgtccccatgaccgtgcaatagcagctgctcccgagagaccttgcaggttcttcctggtccccatctgagagccatggcccccctgtgtcggtgcgtgacatcttttccattcttctaactcctttctatgactgcctggggctcccccgagtgaggctggagagaacagctttgcctgccttgtcagctgctcactctctcctgaggctttggggctggccccggtggggctgggactctgcagtgcagtgctgtcctcacagagggaagggcttgggggacggtagggcatcgcagcctgctgtggggcttacagtgctgcatctgtgtctttgcaaggcagtgaaccccaggtcctcaggatggcctcatccagggcagccatggagagagaggccccagccccgcacaaggggctttgagtctgagcccttggggacacatgagtgtccatttctactctttgcaggcaaggcaggggtggcctcggtggatgacaggaagcagcagtttgtctttagggcagaggccattgcagtgaggtcggagccagcctgacaccccggagccagctccagagacaaaacaggcccagctcagtgattctgtaaaaagctggaaggccgcaggaaccaactgctcggcacagtccagatagcccagcgtcaggtgccttcccggtgcggagaggcctggggcgggttaattaaagttaactgagtgaaaaaataattatagaaactgcagaggggagaaacccaaacctgcaatttaccctccctagcccttgagcttttcagaaccatctggtcgtggggagtcgtgggcaggggagcagggagagtgcctcttcccatctctcatgctccatggactgggtgtgggggcttctttccccagtgcctgggtccgtgttggggaggagtcacccggctgaagtattgtccctgggcagggagatgtccttgggccgagcagcatatttgacctggggcttaaacagccacccagctgtggcctcagaggctactgggagctgcctacctggcctcacctccctcaggcactgacctgtgccagggtggggatgttccctccagcgctcttgggtggaaaaagggtgatcctctcggcctagccagcaaggcccgctggaaagtaaggggacagagtgactgaccttcaaagcggggttggggggtccctagagtgcctgccgcctgtggctctctccccctgtactctgcccatgccctctctacacaccactgcaggaacttatattcttcctttgggcaaatggccttggggtgcccccatctccatgcacagcctggccctgttggcgtgactggctggtatgtgggggatggggaatttctctccctgccctctaggaggaagcggggtaaggggtgagtcacatgggtatactctgggtctgcagtggctggagcagttagtgcccacccccaggaacacgagggggtgttagtacccagcctctgcgcctctgagcttggagtctgttggacacaggtctagctgccccacctccactccaggcaaagggcctcgagcacagggactccagtggtctggccagagcctcagctccctctggtgtgactgtccagagggactgacatacgccaacccatctgtcagtccatcagtgaggacagccctggctgtcacaggagagtccgtctgtgcttgaatatcctttgagcctagcaggctccttttcagagctgcctgctctatggagaccttgtccccagtgccctacagagagaagcagggtggaggcacatccaagagcttctctgcccaccgggccgggtaccagggacaaggacccaggttcccgccagtacctaggcccccgccctgggagcacgcatgcttatttggaggcctggacagtgcagggggtggctgctggttactgactgggggcctggaggttcccaactgggctccccaaggcagggccagagggtgtctcattccatgatttgtccagaggtgcagatacaggagaccctggtggaaagctagcattccagccacaggtgggaacaggcttccctcagcctcctgggtgtgaaaggatggaaagggcacccctgggtaacttgtagagggcagagtcatccggggattgcacttggattgctgcagtgagcagggcctacacctgcccgggtgcctcgcgcctcggtgatgactatccctcctctgccccgtagatctcggcctgatggacgcctggtgtggacgatgagggaagaacgtgccccccacacccaagaggtgacccctgagccagccccggatgaccctgcgacctggaacaatgcggctggcctgcatgttctcttccatcctgctgttcggagctgcaggcctcctcctcttcatcagcctgcaggaccctacggagctcgccccccagcaggtgccaggtgagtccttgcgctgagtcctgccatcactgcccccagctttccagcctgaagctcaggcctccacagctgccctggtgtgctgggcttgggggaaaggggcaagtctgtgccaagacccccggcaggcagagtcctggcttcccggggaaggcgttagtctcaatgtgggagtgctgtgtctgatgcaagacctccagccagtgcctagcagcagggtggccccttttgggagtcatggcaaggctgctgtctattgagccagttgttgcccttgatgaaactcagatttaaacaggattccaccacctctcaggcctcttccacattgtcagggacatcagaaagtagacaacttctccctgagcccatgccccacaagcaagactcagtttccctgcccagccctggggaatctagcctctctggtctggacaaagggggtcagggtacctcctggtttagtgaggccaagaccccctccgagggtcccccactgctacttccattccacccctgcctggtagcccactggagtcacagagggctgctgggaacaggtgggatggcagggaggccagagcaggaagggtgattctggcatctcagggcagacggagtgtggagagggagttcaggcaaggtttctgctgccgggacacggtccccatccccagagatatggaaggacaggaggtcagctggcagggtgccaaggcctgggaactctctgctttggagggagaggaggggaggtgtctcagcagtggcccctgttaggggcagttccatgaagccacacactcacagtccacatgctctagggcatggacaagctggtgcacccccagagacaccgctcctctgcagggacacccactcactctctcttgcttgctcagtgctgtgatccagagacaggatgaaagagaagggggccagaggtgtaggcagaggggttgctgcgtaaatccctgccggaagcccagagcacaggaaggggtcttactctgcaaccgctccgcccccattatggacgagcacccatgatgtgtggcctttagtgcagattgagggcctgtgggcaccaggaaggaaggtgaaaagagcacaaggaggccagagctggggccctgggtctggcagctgccagaggctccccatgggcaggcgaatgagttgagagtcagagggaggcagccaaggcggtggcctccaggagatggtgggcgagtcatcggtgctgactcacgcctgtgccgggcccccacaggtggtggctgtcagaagtgggtctggccgctcccaggcgtctggagcagcaggtgcgcagcagagccggctctcctgtgggagctttgcagcctcacatgagccccagaacagctcatgacactgcattggcagaacagggcccctcgggacagcgccaccagggcagacagcgagctggtacctaaggtcatgtgttatctgcatagaagcacagtcaggaagaagggcgagcaaacgctgactgggtgtgtccttggtgtgtgcgtggttgggggtgcatgtaggcagagggtccaggcggccagtacccacattctgcaggaggagcctgggagaggaggcatgagtgtgcctgtgatgcccacctgggaccagggcctggacccatcggtgggacactcctggatgggactgtggtttggtggcttcagctagtgccctgccctgccgcagcaagagtgctcactgcgcaggtccctgttgccctgcccagcttcccgagtgcacatacgtgtggattacaggtgggctggggacccaggggacggctgggatttctgggaagatcggatcctcaggctggcaggggatgtcagatggcacggagccgaggccatcatccctttgcagctggcagacctggcaaggagcacacgtgggtcttctgatggtccatgcagccagaccaccctcaccacgtgccaggtgatgggcagacttgacggtctgggtaaatcacaccaaacacagtcataaaactttaagtaatgcttacgttactttccctgagcaaagtgcctctgacacaggctgtttgtgttgatttgttactattcatttattccttccctgtacttctcacggcagcctaattgtgattcggtaccaagaaagcaatatcaaagtaattttccacaacattagttacattttcttctgatctttcaagtgaaacaatcccatcctgttggcttctctgagcatataaaccttgattacatttatctgttggaaaccagtgcttacaaagtgtatgtgtccagttgcatggctgggtggccccaagggcccttgacaattctccctgtgaatttctgttggtgggaggaacacattctgggagttgccctgccatcctgatcaggcaaacaggcaggtgttggggtggagggctgggagtggagatgagcggatctacggaggaaattccataccatggcatgaactgtcctggggacggagttctctgggagctgcagtttgtggcacaacaaatgtagaaaggggatggggagtggcgggaattctgagttgcttgaggtcccttggggcctggcctcattcacgtccctcccacgcagccaccggatattaacagcacctgaactttacatggatcagccagccaagctcacctggctcaggcagtagatggaattgtagggggttgccagacttttgtaaatcaaaccacattttaaacattttttttttactacagtccaaatcaaatctttggaaacaggaagagctacccagtaagctatccgatgcgaagatgaagttttgtgtaacagagaattcacttctccagttataattcttttccagtctccaggattgccaggccctgaggccagagcttctgctttcaggaaattcactttttgacccagtagacaagacttacctcttctccaagagaaagacttggagaccaggccagaaccaggaataacaaacaccaatggccaggtgtggtggcacgtgcctgtaatctcagtactttgggaggcctgggtgggagaatcacttgagcctaggagttctagaccagcctgggcaacatagcaagaccctgtctctacaaaaaaaaataaataaaattagctgagtgtagcggtacacacctgtagtctcagcaacttaggaagctgaggtgggaggatcctttcagcccaggaggtcgagactgcagtgagctgattgtgccactgcgctccagcctgggtgacagggccggactttgtctcaaacaacaaaaaattcccaatgtactggctctgggggctgcagaaggctgactccacatttggtcgagcaaactgaattttacgagctgctttctttgtgaatgttttatcatagcgaatttggaacacatgcagtagtggagtaggatagtgccatgaacaccacataccgggcacccagcaccccccaccaacaccaggctggccccatccatagcaccatccacttccctcctttcatgtgatttttgaagtctataccagacatcctatcaattcagctataactatttcttttttctttctttctttttttttttttttgagatggagtttcgttcttgttgcccaggctggagtgcaatggtgcgatctcagcccaccgcaaactccacctcctgagttcaagcaattctccggcctcagcctctcgagtagctgggattacaggcatgcaccaccacccctggctaattttgtatttttagtagagacagggtttctccatgtcggtcaggctgatctcgaatccccaacctcaggtgatctgcccacctcggcctcccaaagtgctgggattacaggtgagagccaccgtgcccagcctcagccataaatatttcaatatatttctcagtttaaaagataagaactgttttattgacatcaccactgaactcattccttaataacatcaaatttaatgattcctcaatagcatcaaatagtcagtcagtgtgcaaatgtctgtctcacaaatataattacctttatttccaatttgttccatccaatatccagaaaaggccctcacatggcagttggtggatgagtcttttaagtctcctttaatctgtaagtttccttctccatctgtattcttctctcactatttatttgaggaaaccaggtcacggttcctatagaactttctgtaaattgagatttggctgattgggcctgtctgataaggattcacgttgttctctgttctttgttgtcccaataaattaggtgaatcttgaagcttgatcagatacaggtttggattggtttttgttttcttctaggggagttttgggggacaggaattcatgggtggttctgtattattccatcaggaggctcctgtctgcctggctgtcttatgttatcagccgccagagatcgtgcctagatccagccattcattaggggttacacagtggcaatgttctgattttatcactccttcttcattcttttaagtggaatggattttgttttaatggggcaaggtgagtcattgtcagtgacccatgaagccaaagtgagtggtgtggattgattggtttattcatagatatgtatataaaactacaatgttaccatacagattctgttgtagtttattcatatatatatatatatatatatatatatatatatataaatgcaatgttaccatacagattctattgtagtttattcatatatatatatatatatatatatatatatatatatatatatatatatataatgttaccatacagattctcttgctggcacactgtaaatagttcgttcttttaatgtttggcttttgcagagtgagttttctttaagtggggctaccccatgtttcagagccctttgccttttcctggagtcaaggagttgtgggtggtggttctagggtgcccagtggggaggcagctgtggtggacagcaaagatccccctcagggacccctggcacagacaatgggattggacagcccccgatgactcctaggtctgtggcctgtcttggggcactcctgcagggcatggggaaatttaacgatgaagataataatgaatattgactgaacatttaccatgggccaggcctcgtattgagaactttacttttttgagacagagtctcgctctgtagcccaggctggagtgcagtggcatgatcttggctcactgcaacttccgcctcccaggttcaagcgattctcatgtctcaacctcccaagtagctgggattacagctgtccaccaccacacctagctaatttttatctttttagtagagacggggttttaccatgttggccgggctggtctcgaactcctgagcttcaggcgatctacctgccttggcctcccaaagtgttgggattacaggcgtaagccaccacgcctagctttacatgttctaatgcatataatttcccttcccttccctcccttcccctcccctcccctcccttccccttctgttcccttcccttcccttcttgaggcagggtcttgctctgtggcccgggctggtgtatagtcttgccatgaaagctcactgcagctttgacctcctgggctcgagtgatcctcctacctgagccgctgagaccacaggcagacgccactacacccagctatttattttattttttatacagacaggatcttaccatgttgcccagactggtcttaaactcctgggctcaagtgatctcccgcctcagcctcccaaagtgctgagattacaggtgtgagccaccacaactggctaggtatgattcttacaaataaacgatgtctagtttgagacaatgtgccagcactcactggggcagacacagaagtagcaacaatactgatactagctaatgctctcaggccctcgagatgagccaggcacaatcacaagcacttttcatatatttaatactcatttactacttttaaaatttcaatagttttgggggtataggtggtttttggttacgtgggtaagttctttagtggtaaattaggagattttagggcacccattcgtcacccaagcagtgtacaccatacccaatatgtaatcttttgtccctcaccccccatcccagccttgtcccctgagtcccatagtctattgtatcactttatgcctttaggtccccacagcttagctcccacttataagtgagaacatgcggtatttggttttccattcctgagttacttcacttagaataatgccctccccatctatccaacttgctacaaaagacattattttgttcctttttatggctgagtagtattccatggtgtatatataccacattttctttttctttctttctttctttctttttttttttttttttttttgagacagagttttgcttttgtctcccaggctggagtacggtggtgtaatctcagctcactgcaacctccacctcctgggttggagcgattctcctgccttagcttccttagtagctgggattacaggtgcccaccaccacacctggctaatttgtgtatttttggtagagacagtgtttcaccatgttggccaggctggtctcagattcctaacctcaggtgatccccccacctcagcctcccaaagtgctgggattgcaggcgtgagccaccgcacccggtcaccacattttctttatctgctcattggttgatgggcacttaggttggttccgtatctttgcagttgtgaattgtgctgcaataagtatgcatgagcatgtgtctttttcatatgatgagttttcctctgagtagatacccaggagtgggattcctggattgaatggtagttctacttttggttttttaaggcaggggtctccaacccctgcgttaggacccaggccgcacagtaagaggtgagtggtgcgcgagctatcaaagctgagctcggcctactgtcagatcggtggccacattagagtccagaagagctcgaaccctcttgtgaactgcatatacaagggatctaggttgtgcgctccttatgagaatctaatacctgatgatctgtcactggatatattacatgtaataatatatccatgtatatacattatatattacaatgtaatagtaatagaaataaagtgcacaataaatgtaacgtgcttgaaccacctcgaaaccaccacctccccacccccatctcccttccccagaccgtggaaaaattgtcttccacgaaactggttcctggtgccaaaaatgttggggaccgctgctttaaggaatctccacactgtttcccatagtggttgtactaatttacattcccaccagcagtgaaaagcgttcccttttcaccacatccatgccaacattattgttttttaagtttttttttttttttgagacggagttttgctctcgttgcccaggctagagtccaatggtacaatcttggctcaccacaacctctgcctcccgggttcaagcgattctcctgcctcagcctcccaagtagctgggattacatgttctaatgccaccatgcctggctaaattttttgtatttttagtagagatggggtttcattattttggccaggctggtctcaaactcctgaccttgtgatccacctgcctcagcctcccaaagtgctgggattacaggcgggaaccaccttgcccagcctgtgagccttttgagaaatgtctattcatgtcctgtgcccactttttgatgggattatttgtttttctcttcatttaatgctttatttttatttatttattttttgagatagagtctcactctgtcacccaggctacagtgcagtggtgtgatctcaggtcactgcagccttgacttcctgggctccagtgatcctcccatctcagcctcctgagtagctgggaccacaggcacccccctcttcacacccgtctaacttttgtatttttggtagagacggggtttcgccatgttgcccaggctggtctcgaactcctggcctcaagtgatccacctgcctcgtgctcccaaagtgctgagattatagtctgagccactgtgcccggcctcatgtaatactttaaaacccctatgagtgaattattattacaccatttgaaaaatgagactattgaggtaagagaggctaagaaccgtacccaaggccacgcagcttctgggcttcagagctaggatgtggcctgggcggctgcctgtggttcactgtaccacactgtctgcccagcacttggggtacccagtattgttgtgttccggacctggagcagagcctgggcagagagaacagtgtggataaaggattggagtcctgagagaatgcggcacgtggagaactttaagtgatttaggggctgcagcatgacctgtggatctagactcctggctgaagacacagccggccctgggcccagcaggcccttgcagtgtggtagaggatccagccttggcctctggcaacaaggagctctggggaccccggagtagggagtggtgcatcagaaagctcattctgggctgggcgcagtggctcatgcctgtaattccaacactttgggaggctgaggcggtggatcacctgaggtcaggagttagagaccagcctgggcaacatggcaaaaccccgcctctactaaaaatacaaaaataagccgggcgtgatggcatgggcctgtagtcccagctacttgggagactgaggcaggagaattgcttgaactcagaaggcagaggttgtagttcttttaaaagaactacaatcctttatccagtgagctgagatcgcgccaactacaatcctttatccagtgagctgagatcacggcaactacaatcctttatccagtgagctgagatcgtgccactgcacttcagcctgggcgacaaagcgagactccatctcaaaaagaaaaaaaaaaaaaagaaagaaagaaagaaagaaagaaagctcattctggtggctgcctgttgtgtggccgtgggcagagagcagacagggagaggcaacaaatgcaaggagattgggggcagccaaggatatcgcatgcagtgttggagacctttcaaatgagaggacaaggaggtgaggagggcggggagggcagtggtcttggttcagggggacttgggtttctggctctagaggagggaggttgggggtgccattcactggggcagatgtgccagatggggagaggtcggggcaatggggcaagagatcacaggttccatttggggcttatggtgtctgagatgcttggcagggtgtgtggagtctccctgtagctcctccaccgaggggtgtccagccccacagaatgaaggaccaggcaagacaggcaggaagcccccaccatgccctcgcccctctgcacctgcgtttccactcacaggtcgacacactcactcctttaccctcatacaccccaggcctggacgctggcaccatgcagggtggggagggctatgggagagccttgccctgggagaggggctggcagctctggacttacatctactccacatttccaggccaggaaaccagtatcctggaagctgtccctgctccccgttgggctggatgccagcatggagattcatgcttttcagcccaaacctcacattgtcctgggatgggacctccatgcctgggtccctgggcttgccagccacagggagagatctgtacatgcccatctgtgtgaaggccctgcaagcccagccgcttagctgtaccgaggcaggggaggggtgcacagggagatggagacacgggaggaggaagctcgggctctgctctcgggagctcacaatctgtgggggtcaaggaaggaggttatccaggcccttccttacagggttcccaatctgggggcagtggaggggagacctggccctggctcagcggcgcctgggggacacttaaggcaggttgtaaacctttcttgagaggtgagtgctgaaggagccaggaggacttcctggaagaggggaactgtgggctgcttgtttgtcctctctagtgaacaggaggtgctgacctccaatggaagcagtgaagcgggcttgggtgagattccagtggagccaggggtctccctccgcagcacgtgctgctatgcgtcatgcctaatatctcacagctagaaatgaatagagccagaagtccaatgcccgcgggtctgcctgatgccggggctcttgttttgatgtcctggaggcagcgctgtgttgattggagaaagtgtggccttcactctgcgtcccagggttaccagggacacactgccctgcctgtgcctgttcggaggaccaaactgcaatgtcagaaggtctgtccagctcctacagtgactgtcatgttctgagtgtgtccccctggagctctgagacaaatgccaggacaaatgtcgtgggtgggccaggaccacaggagcgcctgctaagaagctctcaacagctcacccaaaggagggtgatagaggcaacagaagtgcagcggccacccctacctgctctctctgagcagctgggccaggttggctgcaggggaaatatgtctactggccctctcagagagagtccggtcctcgcgcagctgggcgtctaagcccagactccttcctgggctggtacctgcccctccagtttccatggagccggctgctttccccgggcaggtgggttttattggaaccctcttgcgtctgtttcctgaaaccattttctaacggcattgcggaacatcatatatatttcctacaaaccttgggaggctgacacatccttgttgtgactgtgaacatcagaagtgacatgtaattgcagtgatccatcctgttaagtagctggcaatacattatctcaaaatcagcagggctggaactctcagaacccagtgtttctaaacaatgcacctgcagcttcaaactctcttcctgaacagcgcccaaggctggcaagggccacctcgccctcccatgcctcacttttcctgggccacagcagagacaatttcactccagggaaagccacctactgggttttcagtactcctggagtgccttctccttgtcacctaatgcaccaggctctccgctcagggctgtgggtggggtccttgtcacagtgtttcttccaagcgtggctctggaagtcctgccctccttttttctcataaactccagaatgtcttcgtgggggttcctcctaggccaggccagccatcattatgcacaattggaggtggggaggggcagagagggtggccagagcccaggggcacagaaagccaagccccagttgctactttgcacccagcagggacacacccacactgtgctttatgctaattctggggtatggttcacatagattgcagtgtgaagggtgtcccctggagttgtgcaaagaccagtactgatggagggatggacatggagtgctccttgcgtggtgattgcccaagtgccagaaataggcagggtcggaacatggaaccttcaggtctggataccccgagcctagtgggtttgatgcgtctgggcggtgctagctttgggaccatcattgaattctgctgtttgagggtgggggtcatgaaggaccttcactgccacactccctgggaggccctgatttggagggggagcccactgtggaccctgtctctgcagtgaaagtttctcagttcaagcctctctcacctgagcccaggccgttccccttagcagtgccatcctgtgtcttcccagtcttctacgtggccacgatttcctgggttcctccaccccctgcaattggagtgaatattcgcctcttcctgcagaagacaccctgggggtctctagccagagcctcactttcctttggtacattaaaatatgctaaatgaaaaataatgagcatgtaggaagtaataacaggaatcacctaattaaattaggaaacagacatcacatcgctgtaatctgaaaattgatattaatagaaacggtcccagaattgttatgctaaaagttcctaggggcggggaaattaaaaaggagagcagaatagaaaattgggacaatcatgtccaataagagtgagacttatgttttaaaaggaactacagtaacatgctaaaaatagaagaggagatctaatgaagtcatggacaaaagtggctttgaaaaccgcagagctccaacgcacgtgtatgatggtaatttataaaatgagacaatgtaatcaagcttcaatgtgcatgaaatgtagtcagggttattgtttattgggtgcctggcacgtggtactcattctattttccctcgccctcctcggcaggcgtctttatcctcaactgaaacttagggagattcattcatttacccaaagtcctgaagcctgcgtggctcagccaggatttgaccccagatctgcctgattccaaagcctgtgctcccccttctctgtccttctttccttttgctattagttaatgtcatggtctatatgtttgtttgtttgtttgtttttgttttttgagatggaatctcgctgtgtcacccaggctggatctcagctcactgcaacttccgcctcccaagttcaagcgattctcctgtctcagcctcccgagtaggtgggattacaggcatgcaccaccactcccagtttattttgtatttttagtaaagacggagtttcaccatgttggccaggctggtctcaaactcctgacctcggtgatccaccacaggaatccacctgccttggcatcccaaagtgctgggattataggcgtgagccaccacacccggcctatgttttgttttaaggtaaggggtcttgctctgtcacccaggctgcagtgcagtggcatgatcatagctctctgccacctcaaactcctcgatatttcttttcttttctgatgttattctaccatttttctcaaaggacatttcttgccaacacccagcagattgtggcaactgtcagctccccaaaccgaagccccaaggctcttccattggttgaattaataaaacctacaacaaagacaccttctgaaatttcagtccaactggaaaactgggtctcccattatgtgggggcctgggcagggtccaggaggggcaggcggttccgatgcttgtcctgcgtccccaggtagccccagtgttgggttgcgtctccacagtggccaattgttccccagaggacccccgagggggatgaatctggctctgttcacctgccgtgtgagtcacagcccagagggcccagagcaggtctcaggtgtggagtgaccccgttcccactctgcctggcccagaatgcattggagggaccgggggaggaggaagcggaggtcacaatctgtgcatgagatgcctcaggattacctcgggtctggagtgctgggactgctccgagggccaggcattgagcccaaggaggactgaaggctgggggctggggagggatgccacatggctggacttcttttccctcctcctgtgcctacacctcccccacctctgttcccattcactgcctgagcatcttcagtgagagtcacctggcatcagagccaagcctcccgcacagcccagggcagctgccgtggagaggtggagggcaggggagactccactccccaagtggcaccaggctccaaagaggcccgaggtagggggccctttgcccggctctgtccccttcccccagcctcacttggcctggagtctcagggccaagggggagggcctggagacatccagtgggttgaaacggggcacacccactgccagcatgaagaagggcccggtggggtcccaccgtgtgccaaccctcctgatgtcctcgagcccctgttcctaacacaggcagcagggaagtggtgaggagtccacccacgctccaaggacagggctgttgctacgattgctgtccttctccatggccactgcgtaggtcttggttttttaaaactctgaaaaagttacggtggtagttatgacaacagaagcctggaggtccagttctggaggccaaatgcgtgggtcggtaggggcgggcgcgggcccacacaccctggggctagacgcaccttctgctgggctccaactgcctgccggtggggttatcccgctcttgcattgaggttgacaccatttgtggtgcctttagggtcactgcagatccccctctccttctcacaatatttgcagaagttgggagcctctgggcggatctcatttaagccaaaaaagcttcaccattatatgcctgctgatgttttcattatgaagcttattttccaggatttgtggctctgcagttttgacttgaatcatagtggaagtcagtggaagattcgctcattttgaaattttattttatgtggggaaaatagctgagcttaaatcggttcagttgtgccctctgacagctgccactggggagtccctgcacagcgcaggctcctagtggggggtggaggagctcctgggggcttctcatgttcgcgtctggggtcccagagggaagtcgggggctgcctgtcatcttgccctcaggcctggatgaggcatttttcagccctccccaaaaggcctgaagacttctgagagggtgggctggccccatcctagctccccaccaagctctgtgcctggtcttggttttccaccagggcgggactgcagggatgatgatccgtgagcccctcactacatctggttgtgtccaaaggtgcttcaccatgggaaggctgctcctggcattcctcaagtcctggatggagtcccaagaccccatcccacctcctccaaaggctacagccatttatgagtgcatttgacctttgccctcagggtctgggtctgcattggagggaggggaatgaggagatgtccatgggaactgtgcagggtcactgggatccatcagacagtaggcctgacagagccacagggagcgggagaccacaggatgggggaaaggggatggggtgagggggaagtggacagacaggccccagggccaggggccaccgatgctccactccagcccagagctctgtgcaggagtgtaagtccagggtggccaggtcatcctttttgtttttgttttgttttttataaaagctaagaatctggccaggtgcagtggctcacacctgtaatcccagcactttgggaggccgaagcaggcggatcacttgaggtcaggagttcgagactagcctggccaacgtggtgaaaccccatctctactaaaattacaaaatttagccggagttggtggcaggcacctataatcccaggtatttaggaggccgaggcaggagaatagcttgaacccaggaggtggaagttgcagtgagctgaaatcacgcactacattccagcttgggcgacagagtgagatgctgtcttaaaaaaaaaaaaaaaaagctaagaatcggtaacatacatttatgtggattctcctgattttaaaggggcagctctaatttggaatgtgttttttaacgttagataataggtgatgtttggcacctactgttggttggatgggctgggaggactagatctttccaataccctaaacccccgtagggctgagacctgccccctaggccctatttggctccatgcctgctctccctataccccctgggaggacacagaggaggtgggtctcctggtgggaaggggatgctaagaattacttccagccccataggacccccatgaagccagaccccaagcggtccatgagcagagcatctcctgggctccgctgaccaacagtggctgcacagagcccctcagtggcattgtttggttcagcagccgggagccctgccagatacctgttcactgttcaggtcaggcaggggacctgaggggtcggggaggtgactggtcagcagagatacagggaaggcaagggccagagagtggggttctggggagcgcacctaattaaaacctccttcatttacgcacagttactcacatgcaaatatttgcacccactgacaagcttctgttgctgtagcaaaggaagaatcaattcaagcaaagctttcctgcgagtgggcactctctccagtatctacctggagatgcgggtgtgggtgcccgtgggtgtaaatggaggaggatttctgacttggcagcctgcttcccacagtgatggggtgtggcaggcatggccaccctggctccctttctgcccccctagggcaccatggcagccacactcagcaagggtccctttggagaggggcctggcctggcccagcaagggactctgcagattcgccttccctgctgcctctgtgtcacagcgatgtccccagtactaggagagggacccaagagtcctgagagcattcaaggaggtggcatccaggggtgtggtatgggcaatgatgatggtgtgagcactcagtgcctactgtgtaccaggcactgtgttttacatgctttaccaatatcctcatgccagagcctcgctgtacccgtctctattttatagatgaaaaaactgaagcacagagaggcaaagtcacttgcccaaggtcacacagccaggaagtatcagtgcttgaactaaaacccggttcctcagatcccaaaagtctgaagtcttcttggtgaccggacaaccactcagggctgggagcaagcaccacactatgagatgcatggcattggagggccagcctgggttagaggttggggagctgcacggcactgcccttcagactgtcagggcgtgcttcattcctgctcacagcagacatgttctggttcttgtgcacacgtgtgtgtgtcctgatgaagagtcaggtgcccatgtgtgtgcatgtgtgtgtgcatctggccctcacccataatcctagctgtgtacaagtatgtgtgctcacctcagtattactatacacccatgggtggacagatgccttacggttcatgtggaaagcacttcaccctgaagtctgggctggctgctgtgagcgtaccctgacaatgtcacctgccaggtcatggggcaggcaggggcaaatgacttgggccccacagagtgagttgtctgtcggttgtcagccacaggattgggtgacaaattgccattccagcaggcactcagcaaagccaattattgtaaccccttgcccacgacccgcacagaccaaataatgaaattacattcataatatttcaggtcaagtgatcgctgcttgaattagttccttcccagaacccagccagaagtagcggcagtaattaaaggattttctgggcttaaatcaactgtgcgcgtcaagcgtgtacaacacacagagcttgcaaaatgtgtgcaggcctcgtcccttcactggggagtgaaaaggacaggccatgattgtgggaggaccacaggccgggaggaggtgtgttattcctgccagggaaattttccactttcactcacttattttagagacgtttactgaaagatccctgctccaatggggcctcacagtgagtaaggtgatggggactttctggggtccaccctgactcctcccaagcaggtattttagcagtgttgcaggggtagggtgctgtgtttcccagactaaagtgcaggtcagagttcactgcagctttaaactcctgggctcaagcgatcctcccacctcagcctccccagtagctgggaccacaggcacatgccactgtgcccggctaactttccaatttttctgtagagacagggtcttgctgtgttgcccaggctagtcttgaactccttgcctcaagtgattctcctgccttggcctgccaaagtgctgggattacacgcatgagccacctagcctgacctaattttaggataattccattgcccccgccactaaatcttttgtgcccacttcaatcactccccattttcaccctcagccccaggcaactacaaatctcctttttatcactatagcgctaccctttctaaacatttcatatcaatgtaatcatacactgtgtggtctatcatatctggtttctttcactctgcatgatggttttgagagtcatattttttgatatttactcatatcagtttgtttctttttattgtcaaataatattattctattacatggaattgcggttgatctgttcaccagctgctggatacgggattgttgatacttttggccattaggactaatgctgctatgaacattcatgtgaaagtttttatgcaaacctatgttttcatttttcttgggtaaatatttaggagtagaatggctaggttgtaatagtaaatttacgttaaatttaagggatactgacaaactgttggctaaaattgctgtaccattttacattctcaccagcagggtatgaaggttccaattgctccacattctcatcaagacttgttattatctgtctttttaattatagctattctagtgggtgtgaagtggtgtctcattgtggttttaatttgcatctctctaatgagtactattaagcatattttcatgtgcttattagccatttggatatattctttagtgaaatatctattcaaggcttggcccattttaaaaattggtttatttatctttttattgtgttgtaattattttctagatataagtattatttgacttgcaaataacttatcccatctgtggcttgtcttttcattttcttaatagtgtcttctggagtggaaaagtttctaaatttgaaaaagtgcaattcaacatgtttttcgttgatggattatgctttttgtgttgcgtctaagaaattttttcctaatcttagccataaagattttctcttatgttttcttctaagtttttaagttttggctgttacatctgtgtctgcggtccattttgagccacgttttgtgtattgtgtgaggtctgacttcttctctttgcatgtgaatatccagttatcccagttcccagcacgtgctgaagactatctgttccctatcgaattgccttcgcaccttggtcaaaaataaattgaccataaatttaagagtttatttctggaatctcaatttatttcattgatctgtatgtctattcttttgccaatagtgcagtgtcttgattagtatagatttataaaaagttgtgaaatcaggaagtgtaaatccttcagctttgttctttttcaaaaccattttgggtattctgagtcttttgcatttccatgtaaattttaggatcagctcatcaatttctgccaaaaagaacaacacctgctgtgacttgataggaatggcattgactgtaataataaacttgagagaattgtcttcttaacaatattgaatcttacaatccatgaacgtggaatgtctctccacttgtttaaatcatctttaattcttcttaccattatattgtagctttcagtatacaagtcttatctttctttagttaaatttattcctaagtattttactctttttgatgctacagtgaatggaattgtttttctaatttaattttgggatcattcattgctaatatatagaaatacaattgatttttgtatatttatcttggaacctgtaatttgttagttaattctaattgtttatgtaaattccctaagattttctacatacagaattatgctctctgcaaataatgagatgtttacatcgtcatttccagctcgaatgccttttatttctttttcctgcctgattcaactgactagaacctctagtatggtaggaaattgaagtggtgagagtagacattcatgctttattccggatcttaggggaaaaacattccatctttcaccaataagtataatggttgctctaggatttttgcaaatgacttttatgaccttcaggaaattgtcttctattactagtttattagaaaaaaaaatttaaccatgaataggtgttggattttgtcaaatacttgttctacatctattgagatgtttatgttgtttcatcctttattctgtcaaaacggtgtattatattgatacattagcctcacattcttgtgataaatctcacttggtcatggtgtataatcctttttatatgttactgaattaagtttgctcaaattttgttgtggattttttttttttgagggatagttgtagttttcttgtgatgtctttatctggctttgctatcagattaatacaggatttaaaatgaattgggaagtatttttacctcctcctaccctatttctctggaatagtttagggaggattggcattatttctttttaaatgtttattagaatttatcagtgaagatatctgagactagacttttctttgtgagacattactttttttaaagatggagttttgctattgttgcccaggctggcctctaactcctaggctcaagagaacctcctgcctcagcctcctaagtagctgggactacaggttcatgccactacacctggctccagactttaaaattttaaatttctagctcaatgtcttcaccatagttctattcaggttttctatttcttcttgagtcagctctagtaatttatgtctttctagggctttgttcatgtctttctagggctttgttcatttcattcaagttgtctcatttgtttagcataacagtgttcatagtattctcttataatcactagtgatgtcctcattttcattcatgatgttagtagtttgtattgtctctctgttttctttcaaagtctagctaaaggtttgtcaattttgttgatcttttcaaagaaccaacttttagtttcattgtttttgtctgttgttttcctgctttgtattttattatttccttgctttagtttgcttcaggtttagtttgtccttttttcctctcttttgtttgctttatttgttacttcctctcttttgtttgcttcagatctagtttgttcttcttttttcatttcttaaggtggaagattaggctattgatttgagattcttcttttctaatatagacattactgctataaattttcctctaagcactgtgttagctttagtcaactttaattgtctgatttccagatcttcttattaaatttctgtctgatctgctgatctattggttctaccaattttatcacaaccttgggctagctaagatttttgaattattttcagcaacactcttgggcatggaattttccaatcaatcaatgttcatgcctgattccccttggtagaatgtaagcccccagggaactgggcaaggtgatgaaagcagccccaggctacaatgccataacctcacactgttcagtagattttcttgaataaacgcttcttgatatgttgtatgcttttggtcaatttctggagtttttttttttttttttaaggggtagggtctcactctgtcacccagactggagtgcagaggtatgatcatagctcactgcagcctcaagctcctgagctcaggcgatcctccctcagccccccaagtagctggaactacaagcatatatgaccatgtccagctaatttctttattttttgttgagagaggcatctcactatattatctaggctggtcttgaactcctgatatcaagcaatcttcctgccttggcctttcagagtgctgggattaccagtgtgagccaccatgcctggcccaaactttttaaatggtgatggttgttgtttttcctgttccgtcatttcattttgggaaagaagctaccaggcttctcactcagctctttcagaagccctaagtctaggactggggtcttgatatctacacagacaggagatgaggtctctgactcaaccacagtgctgagctggaagtgcaactgctctgtaaatagagccctcagaaggtatcagaacctctggccattggtggagtatgttgggacaatcctagtttacacctgtggcctggtgtaattattatcagtgcccccttactctcagaagtgggtttatttgatgataaatcatatggtcattgtgtagtataaattattgtatacttctgtacttctgtaagaagaaaatgcaaccagaaagaatggatacaagaagtagtagtaaggaaataaattgtaggaacattgttaagtataaataagtatttactttttttggtgagacagaatctttgtcacccaggctggagtgcagtggcatgatcttggctcactgcaacctccatctcccaggttcaagcaattatcgtgcctcagcctcccgagtacctgggattataggtgcacgccaccacacccagctaatttttgtattttttagtagagatggggtttcaccatgttggccaggctggtctcgaactcctgacctcaaatgatctgcctgccttggcctcccaaagtgctgggattacagatgtgagccaccacacccagccaatatttactttaaaaataataaacactaattttgccagtgtgtaaggacagcgacaacgtggaagtttagacaggaaaccgtaattggaatgaaaaggtctataagatctttatgttgttagggaagacaataaggatagtaaaacaaacaaagaaacaaaaaccaactttggactttatttaaaacaaggctagtcactggaattgtgatgtatattttctggcctctgcactgacccctcccagtagagcccactcctagagctgggtggctgtttaatcacttcccgttcacccgattggtgaggggggattcccatccatggttatggggatggccagcactcaacactggacagaagagatcaacagcagtttatttgttattatgcccaagcctgggggaggaggattgcaggggttgcactcggaaacagggtggacaagcgggggctgtgggaggcaggctttgtagtatcaagaaggtgaggtgacccctggttgctgtgggaggatgtcatgggtttgtttgaataattccatgggcgggcagggagtgaaacctgctacttgtgaatcagcaggcactgtgcctagtcccttgataagtaggtcatttggctgggggacttatccaagcgaacagtggggagaggaacttgccgttagtccatttgcagccgcccacacttgctccaggtgtcaaggtagcacataattttaagggtcttaactttaggccttgcactgcagcggcagactgtctcacaggagcctaagggtgggagcactccctctatcctgagtaggggctgacccaagccaagtgagttgaggaggagactccttgcccgagtctcaaaacccccacccccaactttggtgctgggatcccctgctcagtgtctgccctgatcaccctctgccctctcactctgcctgtctgtatattggtctctaccatctgtccatcttcactttcagggacgtgctgtcaaaatccatagccctggggctcatttgtggctcctccttcaatgatgtatatggaggctggccaacccatgtggccctcgccccatggagagcagctgggcatcgttgatgaggtgctgagcccagcatcgggtggctggcactcatactccccaccagccataggcaaccccagcctcctctgacataagcccctccatccctgacacacatgagggggtccatagcctagcagtgctcactgtcatcccaagacctaatgtgattctgtgggtgggtgcaggtgaagttcacctgctgcttctcgctacccacagcagtctgtggagatgccacatcttcctttcaagatctgcgatctcctaatggaggaaggaggattggctcccctggtaggccaccatcacctgggagatgcaatggtgccctcccaggggagccaattatgcaatggcatgcttggtgagtgacattctcatgaacgccactgcagcctgggcagttggccaagcagctgcccacttccctcttttcctacagggtctccatttctcctgggagcatatagctctcaggcaaaacctgagtattctgagttatgtccactggggaggctggcactggggctttttttgtttttgtttttgtttttttgagacagagtcttgctctgttgccctggctggagtgcagtgacaccatctgggctcactgcaacctccaactcccaggttcaagtgcccctgtctacctcctaaatagataggattacaggtacctgccaccacgcccggctaatttttgtgtttttagtagcgacagggtttcaccatgttggccaggctggtctcaaactcctgacttcgaacgggcacccgccttggcctcctagtgttggaattacaggcgttgagttaccacacccagccactgggggttttgaacctgccactcttttgagctgcagaatccctgacagagcctggctgaggagtgcagggctgggggcaagaacagccagaacactgtggcttccttcaatctacctgcaccaggaggggcaggcgttgcttagaacaacagttctcaaccttgactgcttgttaggatcacctgtggaggtgttaaaaaccccagtgtcctctatggaaaacagtatggagatttctcaaacaactaaaagtaaaactaccatttgatcccgcagttccactaccgggctatctacccaaaggaaaagaagtcactctataaaaaagacacctgccttatatttcttgcagcagtactattcacagtagctaagtcttggaatcaacctaaatgtccaccaagagagaattcggtaaagaaaatctggtacatatataccatggaatactatgcagccataaaaaaagaatgaaatcatgtcttttgctgcaatgtggatggaactggaggccattatcctaagtgaaataactcagaaacagtcaaataccacatgttctcagtaagtgggagctaaacgatgggtacccatggacatacagaatggtatgatagacattggagactcaaaggtgggaggataagaggggcacgggggaggaaaaaacctattgggtacaaagcacactatttgggtgatgggtacactaaaagcctggacttcaccactaatatggtttggctgtgtccccatccaaatctcatcttgaattgtaactcccacaattcccacatgtcctgggagggacccagtgggaggtgattgaatcatgggagtgggtctttcctgtgctgttctcgtgatagtgaatgagtctcatgagatctgatggttttgaaaaggggaatttcccacacagtctctctcttctcttgtttgctgccatgtgagacatgcctgtcatcttctgccatgattgtgaggcctccccagccacatggaactgtgagtccaataaacctctttcttttgtaaattgcccagtctttagtatgtctttatcagcagcatgaaaatggacaatacacctctgcagcccaccctgagagatccagccagcccctccctccacaggctctgtcccagcaccatggtgacttgtcacttctccctccattcctgttcctcaagatcactcctccacacaattgctctgttcatatttgccctgttgccctccaagcttctccagacaagaaagaactttggtcctgcccttgaccaagtcactttctcaccctgtgccctggtcctccccttcccgactcgcccagggctgctgtttggtcaaggtcatggacgtgtgtgaatgccagaagctcccaatcccctctctggctgtggcatcacctgccttgtcctgctgtctccagcatgatctcagcccctgctggagctcagacccatgtgggtaacatggggctcttggctgggtggtagcagtttctcctggaaactggggtcagggagagaaatcagtgacacagagggcctgtttctgaacagatagataggatcagaccttgagagacaacttgataggatagtaatttaggaaatggaaggcagaatttccttgggcctgtcagctctgcatcccagcatgcttctggttgccttgacaactcaacaggttaaacttcttttctgggcatcagtgtctgctcaggcaggaggtgacagaacccctggaggtgtgcagatcttcagcaggcagatgactcagagctcaggctgaccttcaccttgctgggctagctggccttgggttgtccctggctgcctgcatgagcttacgatcatgtccaaccagctgcctctgcctcctatccctcctattcatccatccattcatccatctgtttatccagtaagcagtcattgagcacctgctgtgtgcctggccccatgctagcttctccaggcaggtacatgagttcctggccctctctccaggtcaaacaggaataagctgggaggtcaggaagtccatagaggctttacacctggcatatgtgtgggtccatttagaaagatactctcaacacatgcaatgttgcaagcctgtcacccaacgtctaccagacccttcttatagatgcgtcatttgcaaaaacaaaaacagtctgttttctttcacttaacactgcagggtggacctcttaacctctttccatatcgagacggatttttttcacccatttcagtggctttcagtgttcgttgtaaagatgcaccattagtttatttagccagctcctttctggttcatatttaaactgtttgtagttttatggctattcctgaattatttctgtttcctctgatgtcatctttttctgtttgcttcttttgatgtctcttgtggtggaggctgtcctcagatgcttgatgagccctagttacccattcatagttgagagtggagcaataaacatgtgattgattttgttttgtttttgagacagggtctcactcggtcacccagactggagtacagtggcacgatcacgactcaccacagcctccacttcctaggctcaagcaatcctcctaccccagccttttcagtagctgggactacaggtgtgtgccaccatgcctggctaattttgtttcctttttgtagagacaaggtcttactctgttgcccaggctgatctcgaactcctgggctgaagcgatcctcccgcactggcctctcaaggtgctggaattacagatgtgagccaccacacccagccacctgattttgtaatcggaaggagggggaagagcttttcttcagggtattcgggtgaggagtcaaccctcttggttccaagggagaatcattagttggctagggttgctgtagcaaagtattatggactaagtggcttaaacaacagaaatgtgttttttcacagtcctggaggccaggagtctgagatcaaggcattgggcagcgtcggtttcttctgggacctttctcctgggtttgtagatggccatcttctccctgtgtcctcccatggttttccctctgcccctgtctgcatcagaatttcctctttataaggatacccgttctagggatcactagggtacactctaatgactccatttttgataccggtgggctgggggaggtcctcgaatgccagtggggcctcaaccccagccagtgtccaggctcttgacacccttgcaagaaggaattcagaaaatagtgcaagtatagggatttattacaaagtgaaaagtacatgctctggctgggtgaggtggctcatgcttataatcccagcactttgggaggccaaggcaggcagatcacctgaggttgggagttcgagaccagcctgaccaatatggtgagaccctgtctctaataaaaatacaaaaattagccaggcgtggtggtgcgcgcctgtagtcccagcttctcaggaggctgagacaggagaattgcttgaacccaggaggcagaggttgcagtgagccgagatcacaccactgcactccagcctgggcaacagagcgagactccatctcaaaaaagaaaaaaaaagtacacgctcaagaaaggagtgccggcagactcaagagtcgtgtggtggggtgtggggctgctacctttatgcgtttatttaatccaggggtggaatattcatgaaaattcctgggaaaaaagtggagatttcttagaactgtagtgccacacgtttttacaccaaacatgggtggtctcggaactgtcacagcactggtgggtgagtgagttaggatgttaatgagcatacagcgaggtcctaggagaaaccgaggtcatatctagtgccatgttgggcccagttggtcttagccagcttggtccacaccctgtttttcagggtgtcatatgaaactactgcctggaatttttattctcctgtggccaccttgtattattcctgtctcattttaacttaattacctctgcaaagactctatctgcagtcacattcagaggtactgggggttaggacttcaaggtggatttggaggggaatgcagttcattctataccaaacggacttgcagtctccatcctggcagaagacccccagtgtgtacaggaccggaaggcagccagggctttgatcactctgtctgaagcctcccagttagtcctctgaaagcagtgctccctgctcctcctcccagcttggagtccataggttatttgcagtttcctcagcaggtacatcttccatctcccgccaggggtgcagtaggggatagttgcctggtcactggattgtctttttttctttctttttttttttttttaaacagactcttgctctgttgcccaggctggactacagtggcccaatcatagctcactgctgctttgaactcctggactcaagtgatcctcccatcttggcctcccaaagtgctgggattacaggcgtgagcctctgtgcccaactgccactagatttttaagcccacatttcacccctgccatctgcctgtcctggtgcttccaagtcctgcactttgctgcattctgtggggcaaggcagtcttccccgcactcctctgcaggctcagctagcatgtccccttcaccctgtagaatctgctcccaccctccgtccccttcccatcttccaaaatcatgttgcaatctggcatctgctgctgttcctctctagctctcttcattaccatgggcccctctgtttcattccttcgctgtcattatgctgggatctcaggaggaagatgagctcaacgtacacgttcagtccctgtgtttacccagaatcctcctggcttctccccaagaagaggtcagagccgcagcctgcggaggagggtgttgaggcagctcagccagcatgaggctggccctgctggatccagtggggagaggtcacggtcccctagggctgaggagggagagagagagctgtgggcggggcctgtgcatctgtccttggagtcctgaagtcttgaatctctgttgctactgagagggaaggaggcctccaggtcttgctctgcactacaggggctctggacttgttggagaggtgtctcttcactccagggcttccacccgagacctgggctcccgggactgggtgtgcccagcctcctctcccccacccccctgccagtgatgtcataggtgtgacactgcagccaaagaccaggcgaactcaggcgggtgtctaccacctccaaaataaaacgtgttttctaaactgttgctgaagctgctgaaatgttttgtaaaatgtttacacctcccttgatataaggcaaataccttctgtcagccgggggtgggccgggtgggggagccctgggcggggaggcaggatcaagtggctctggtgtcattggtgacacccatgtgtgttcactcctggtggaatttctcctctcaaggtctctctgtccttgctggggagatggggactgggtccttggacacttctgttttaggaagcctaagctcactgaggaattgttctaggggaagtgtctttgaaggaggtgaggcagacacgaagtccaaagctgaggggatggggagttgctgaaaatgagtgttccctggagagtggcaaccatccctggaggtggcaggcgctgagagacagaactcggggggacacctagggagactggactgcagccccagggctgacttcccagccatctgaccagagggaatggaaggcagagatcccccagacaccccaggctgtctgggtccagggagcttcacagggtcctaaagagggggatggggacctggagcaatttactgtgagttacaaaaaaaaaaaaaaatcacatgcagtcggacctgaaccatgcacagtgagcctggctttacacttgagcatgacacgtgatacccactgtctcctccagcagctctcttgaaggccagggaagccagcccgtccgtgacctctgtgacagagctactgctgcagccacacactcagtgtgtcaggcactagatagaaatggaaaggcttcaggccacacacaaggccgtggggctccagcttcccctctgggagagcttcggcactacatgttctctcctaggcagcactgtggtgtcggcagccccgctgtctgtacacacagctcctccgccaggctggagtcaccctctatgcccagaaactcccacggaagaagggcatgggcagctcctcataccatggggagggacaggagggactgtgtgggcctggtggtgacatgcacacatgacatacacccatacatgtaccacacatacacaccccataccccatacacacgccacacatacaccacacatacgcaggccacacacacatacacactcccacacacacatcacatatacacactgcacacacacaccacacatacatacacaccacacatgcatcacacataccccacatacaccacacatgcaccacacaccccgcacacatgtaccacacacatgcaccacacatatataccacacatacccacactgcacacacatgcaccacacatacacactgcacaccacacacaccacatatgcttgccacacacacacggaatgcatgtagcaaacacactctgcccattggcctctgtccaccatccaaagcttctctgccagccctggcatctgcttacagtggaggggcagcccttttcttcctggggctcccacagtaagctgagcagagcacactgctgagagctggaagttctcccctcaagaccatggggacacaggaggcagggagctgggcaggcagtggtatgcagtgtcaggagcctccagggcaggcccccactcccctatcctccttccactatgcagttccttccccttgcaggggtcagcctagcctgggagctggggccagttcaggggcttccatatcagtgagggccacgtccatcattgctgaaagcagagtggccaccagcactggcccgacgtggacgcagggaggagtggtgcccagacctggcccaagccagggtggctacagtttgatctgaccagagttgccctgtctgtcttcagcttgcacctctggccatcccaggttcagggccactcatctcagctctgtcttatctgtggaaataggaaatcaaagtccatgtaatcacaagggaatcgttcattgggaggcaactggacccaaccagaaagctagtgctctcggggaccctctctgggggcccgcagccatggctggaaaccctattgcagggtcctcggagtcagcattggctccagcagcatgtgtttgccttgacaccagaagatggagccctgagccaactcacattcctccagtccccagtccttctccatcttctgtcctctgagatcgggcatcctccaggacagagcccaggtatcttcctatctctgaacacccacagtcaccttcccacactgcatcaccacagggtgtgcagggcctaacactgctatgctaggttcttaacacatgtctgttgtgtggttggatggatggacagatggatgcatggatggtgagtgggaagatggatggatggatgggtggatggatggatagataggtggatggacagattgatggaaagatggatgggtaggcagatgagtgggcatatggatggatggatggatggatgagtaggcagatagatggatgtgtgggtgggtgggtgggtagatggatggagggatgtatgaatggatagagggatggctgggtggaagaatgtatggagggaagggtggatggatagatgaatggaaggacggatagatggatggaaagttggacagatgggtaggtgagtgggcaaatggaagtatgtgtgggcagataggtgatggagggatagatgtttgtatagagggatggatggatggatggatggacagatggatggatgggtgggtgagtgggtagatggatggatggatggatggacagatggatggacagatggatggatgggtgggtgagtgggcagatggatggatggatggctgtttggatggatggatggatagatggaaagatggacagataggtagtgagtgggcatatggatggatgggtagacagactgatggatgagatggatggatggatggatggatggatggatggatggatggatgaagggatggatggatagatgaatggatggatggacagatagatgggaagatggacagctaggtgggtgggtgggcagatggatggatgggtgggtagacagtctggatgagctgaatgaatgggtggatggaaggtgggagggagggagtgatagatgaatggatggatggacagacggatggaaagatggacagatgggtgggtgcatgggcagatggatggatggatgggtggacagactgatggatggacggacggacagacggatgggtaggtacatgtagtaaaagaaggaaatacatgaggggaggcaaagatttgttggtagactgaaccgtagcccctctggggactaaattctctcaggaaacaggttgaaagctcaacatcatctccagaagctattttcttgcagttcgcacacccagcattcctgtggtcttgtcatcaggctgcctctggccctgtctttcttacctctttgttccttggttgcaccccttccccctcttccctggggctgggcattctcaattggtaacacgaacctggaggggatgtgaatggagatgaggtttctggggagaaacagctgtttcccaccccgagcgtaactcccatcacgggccttgggaagctggaacagcctaacagccacccccagttccccacccacatctctcttttctccctgctttgatgttctccagttagtcctggctcagcctctgcagctgctgatatgaatacactaagtggatcaataacatgtcagtcctttgccaggagcaagggtaagagggggtctgcatctatcaagtgctgagtgacagctaatcatttttcacctggcattcacccttccgaagataagcccggctctgctgggaacaagaagacaacgtcagaggctcccctgctccacttcctgcagagcccagggcaccagcctggctcacatttccactccctatgcgtgatcctgtgttaagtgtggggctcagtgggaatgtgtgcacgccctgggttcatgagcaaatgtgtctgtgggtgggattggatctttgtgtgtgcgtgcatgcctggaggctgaatacctgtgagtgtgtgtgtatctgagtatttgtttgagaatgtgcatgactgcgtatgtgcagatgtctgtgtgcacatccatgcagatctcagtatccatgtgagtgtgtgcatgcacaggcacctaggagcatatgtttgaccatttgtgtgtgcacgcgtgtgtctacacaaaggtgtgtgaggggcctgtgttcatcatcaaggtgttgctgtatatgccaacatctgcatctcccttggttacccttgagtcctctctctaggagacaggattcccagcaggctgtccttccctgagccatttcactgccactccctgctcagctggtgcctagaagagaggagtggtggctggaaccctgtgctcacctaccatcccccttcctgctggagaaagcaggtgcctgtagaaggaaggcagtctgagggtgaaggatcctggattggacaggaacatttcaattgcaagggacagcatcaggtagggctgtatctaggctctgccttggtgtggtcagaacttagcttctccattccttgcctctgcttctcctctcgtgggcttcagtcccagatagccttttgccaaggggtggccctggcatctctgggccgccattgtcaccccattgtgttacctgatcatcctcgagccaattcctttggcaggaggatcccatgccccttctggtgtgggtggtgccacctcatccaaaccacaggggctgagagtggggaggagtagcttcccgtggcgaaggggtgctggtgtggttgtgaagggggaggttaggtggacagaaactgagtgtgggtactttcctcctggggtgaggtcttgcgtctcaggcactaagaggctcagcctgcaggcaccgggcctggctcctcggtgcccttggccccacatgggtgctgtgcagtcacttccatgcagccacaggcagctgctctggcctcaagctttagatgagcctagcctcctgaccaggctccaccggttaccccacacccaggcccagccccctcctgacacaccctgccccacaggcagcttccatgccctgggtgtggggcctgggacctccaccatcctctcactgtgcagaaggggaaggtgctgggcgagcccccacccgggggtcaggtgctgcattaggggcctcaccttccccagtgttccctccacttttagatgaggatacccccggcccccatccgggctcagccaaggagccgtaagcagttctgtaaagtgtggctgcggggctggcagccgggctgctcttcccaggctccatgaataattgaagctccattaaaatgtgcgtctgcagcctggaggacacgccctccctcactgagtgtgggcgcaagcctggacagtattgcctggggctgcatctgcctcggaaggccctggaggggcacaaagaccaggtcagacctgccactcctgggccctgcccctgccccctctccttccctgccttcccttttctccccatcctagcatgtggcaggcatggagacctggccctggagctccccagccaggtggcacagagaggcccactccgggtgggctggggaggtccccagctgctccacctctccttgggcactgacagagcctgctccaagggtggactgtggcccagagtggggggccacacctcggcacaccccagccagggaccaggccgcagctgctcaccagcagatccctggaggatcgacccagcagatgctgggggttggggagggagtgagggcacagagctcccgggagccatcggcagcgcacagctgtcatcaggagaccagcactgctgtgtgtgcaagtgcaagcatatgtatcggggggcgctgttatgagggacatgagtgtgcgtgcacagagtgtgagggtgtctccagagctgcgtggctgcatgtgattgtggggacacaaccgagtctctacgtctgtggctctatgtctgcgcgtcacaaacccttgatcaggctaagaggtccccgtggggaagggcatttctccttggctcctgactgatgcccctccccacacactcaccccccaggggcatcctgtacctgctgttgtgggcccctcctcgactcattctgagagctaagcctcgagtcctaatccaaatctgaaattcctggtaatgaaatctgtgaaaggtgaaaattaaaaacccatggccacaatctcctggtccctgcagtggcccagggtccctgctgagccctgcgtggggcctcgaggcgccagtaccagccctttccccactgccctgccctgagctcagtgagccttcactccctcattagcaagaagggtgcttctcctgccttcaccttcctttgccccaaatgcgacgcaagcgaaagatactctttctcccttggctctcccacccactctggcctccctggtcctcaccactgggactctgggggtctcggcacagaggtgtgatgaaagaagggttaggggctgccagggtgagccaagagaacagagctggaggcttcagcctcggccagccccttatctctagcctcatcttctatattctctcatctggtcgtggtgggtgctttgggaaggatcagggcagagtgacctgggccggagcctggccacagggtctaggtggctggtattttgggctgagctggacttgcccactggagacactgggaatggggccgctcagggctcttgcctggaagtggtccgattccccttggcccagagagaagctttcagggtggggcatgaaggtcattgcccgctgcagcaggggcttcttgcattctccctcttcctcctgtaagaaccggggtctgagttgacccagttctatcccaaggccttcagcaaccgggcagaaggccctcaggccactgacctcttgagatgactgtgctttgtggccaggagtggaaggtgtggtggtagatggggcaggggacagggccagccagtcacataccaggtcctaaaggccttgccatcctgggacctggtattgatgtctttaaaggtgagtatcagctggtcacattggctcatgcctgtaatcccagcactgtgggaagctgaggtgggaggatcactttagctcaggagttcgagaccagcctgggcaatatagcgagaccccgtttctacccataatacaaaaattagcatggtggcgcatgcctgtagtcccagctactcaggggcttgagctcaggagatagaggctgctggaagtcctggttgcaccactgtcctccagcctgggtgacagagcaagaccctgtctcaataataataataataataaaagtgtgagcatcagctgggaggtggggagtgaagggtgtgggcactagaactccctctgggtggctcacaggatggggctggatcggtgtcccaggagcagggaaagccacccaaatgtcccacctctcgacagcagtgctgaactccagacatggcgaggacaggtttagatttgattcttcctcctgaccgccataaagaagggggctccctggcaaggggctaggagacgtgggccaggggctgcaaagaaaggggctgaggggacagtgcatgccggcaacccagccctcagggccatcccgagtgctcagcctcagtgcagctgctcctgctcccccacctcgacccgcacctctgctggcagtgctcccctcccagctcctgcaccttcccctcctctgcttgtatctcagtcccacccacttttccaagcccagcccttccgtgccactttcgctgatgcctgatcctgagccctctcctccccttcccaggccctttctgtgccaaagatgcacttcatccacagtcgcccgggagccacttctggccacgcgtcctgctccccaggtgcgtcctatggtggggatcctctcccaccacctccctttcttcaaatgaggctccctggctgatcctgtgttcctgccaggggaaaaacttggtaccttgggcatccccttctggaaatcttccatatgtcaggcttaggacggacaggcagcgcaggaccacaacttgtgccgacccaggaggctgaaccagcctcccgtggtggctgcagcactgcccaaggagtcgccgtatgtgtgaacccgtgtctgtgtgtgtagagtgtgtgctcccggcccctgaaagcctgtggccacttgcattcatgcacatgagtgtccatgcacatgtgtgtgccacagagtcccagagtgggctgtagtggagccgagagtctgccgtggtcaggccgtgcttggggctggggcctcagcaccggatggggctgtgcatcttgtcgcgcctggctttattaatccattttgtgaatagacttgggagttcatgttgggaatctggccatttgctcccatttcctccaggccccccggaaggaggaacacatgttaaatatttgcggttttgctgcgttaggttttaaagttcagcagtaattaccgtgaccaggtgccaagtggatctgctccctggagaaggctcctgccgtagcgggctggtggctgcattccaggccagcctctgtgtggcgtttgcacaagcctgtgtgccttgctttccggcgcctctctttttcggcctccactgactgctgggcccttcactcggctgggctgtgccttctgtgggtgggtgctctcctctggcccagccccggcccacactcccaaagagcaggctgcgggcagctgaggcaccaatgtgggactttggtaagcagagcctgggggctccagcaagtgccttcgctcccacggcaggttcatggccacacctgtggctgtccacacacatgccatcagagcagacagaactgtatttccagagcacatgttagtttttaaatccctcaccccagccagccccatttcagactactcagttactctttcatgtaaatttcatccaatcatgttttcttgcacaaattcagcatcattcacacatccccgttgagttcacagttctctctaggctctggcctgggtgagtggtgacatctatgtccttgatgtggatatatgcagatgctgcttttggggcggcttctgtagccagggcggtgccctctgcttcctgggtagcagctgtgtctctgctgggcttgacctaggactacatgtcacacccctcaacagtgatgtctttcagggttgctgccagatcaaaggaagagttgggggaacacagtgccagcaatgccaggcaaaggaaaaggggcacattcagccaagcctcaagtaaccatgccctgcaggcctcacacagtcccaagagagaaccccgcatggcctctgatatttgggtgtggttcgatgagcatccctgagacagccacaggcacccagacatgcacctgccctcaacagactcccagcccactgggaagagagccacacatgctcagagtacaggtgcttaggagggggaggtgcaggggagcccaggccagggaagggagagagggaagcagaccccacttcttcgagctccctgggaggcctgtgagcccagggcaggaggagctggggtcatctggggagaagatgcaacacaaggcaagcttgcccagtgagggagactcagtcatgaggacagaggtgagctccatagggtgctgctgcgttagtctgacttctggccctgccctctgtggaccacatctgagtcctgcgggatgggcttggaataagcaagaagagcatctagggcatgttgagaaagactctggcacagggagctgctctgctggcttctagcaggcgtgggcagagaggagatgggcactcccccactgtgcaacaggataccctgcaatttagtaatcccaagacctccaggcctcagtttccggtagaacttagagggaaatccaaaggaagcccacagggaaacagactgtcattaaagtgcagctggggctgcagtctcatctgacggctcaacaactgagggaggatctgtttccaagctcagccaagtggctgctggcaggattgagtccgtctcaggctgttggccagagaactccctcagttccttgccatgtgggcctctccgtagcacagttcatggcataggagctggcttctttcagcgtgagcaagccagagagggaaatgagacagaagtcacagcgcgtgtgtaacttaacctcagaagtgacagcccgtcattgtagctgtggtctatgtgttagacgctagcctccaagtccagcccacctgggaagggattgcaagagcatgttgccaggtggtgaggattgctggcaccatcttggaggctgcctgccgcaggtgaggtatggttgaggtgctttcatagggaaattgtaaccatcataggtccactggccaaagcatacagcaagtcaatacacccaaacctggttgcaacagagaaagagatttaattgtagggtcactgaacaaggaaatgggaaaaaacctcaaatccagctccccaaggagtttgggcctggggtttttaagggttttggagtgggctgaaggatagagattgtcgactggtggaagagtgcagggtgaagtgccaggggcagtgagaggaagaacctgtgttctcaggctgatccccatcttctgtggggtcttcaaactagttttgctggaattcacagtctgaaagaaaaacatcgtatatgatccttaaacaaaagcctatgattttaaggttggagatcctgtctataggagcaatggggatgccaatcaattctcaaacagtcttaggaccctcatgtcagaaatcctacctataggagcactgggggtgtgcatcgtcaagacttagtgccatgtgactttctgctacaaggaagtgggccaaagtgcagcctgattgatgcttaattataactatattcccgtcgagaacccggcgtgcaattcttgccaattccgtggggacagtttcaaaatgacatgctctgccttcccctgtaaaaggatcactggatgctgtgaagaaacagtcagaggaagcaaggttgaagcagggagacctcttgggagaaacacttcactaaaactagtttctctctctgtacaatagatgtaaggttaatcatagaagctgtctcaggcgacattgtaagaattaaatgagataatacagggaccacgctaagctcattctttggtcttttcccctaaggaaagaagtggcacatgccccactgccttttcgagagtctggcttatgctgctgcctactcgagttcattggatgtgttactggaaaggggtcccaatccagaccccaagagagggttattggatctcacgcaagaaagaattcagggcgaattcatcaagtgaaagaaagtgtattagtcagggttttctaaagggacagaactaataagatagatgtatgtatgagggggagtttattaagaagtattgactcccacaatcacaaagtgaaattccacaataggccgtctgcaagctgaggagcaaggaagccagtctgagtcccaaaacttcaaaagtagggaatccaacagcacagccttcagtctatggctgaaggccccagagcccctggcaaacaactggtgtgagtccaggagtccaaaacctgaagaactgggagtccgatgttcgagggcaggaagcatccagcacagagaaagatggaagctggaagactcagccagtcaagttctgcctgctttattctagccgtgcttgcaactgattagatggtgcccacccagattgagggtgtgtctgcctctcccagtccactgactcaaatgttaaagtcctttggcaacaccctcacagacacacccaggaacaatgctttgcatccttcaatccaatcaagttgacactcaatagtaatcatcacagcaagtttattaagaaagtaaaggaatagagaatgactactccataggcggagcagcagcttgggctgctggactaaggatacttattgttactttgtgattatatgctaaacaaggggtggattaattatgagttttccgagaaaggggtgggcaattcccagaacttagggtttctcccctttttagaccataaagggtaaattctaggtgttgccatggcatctgtaaactgtcacggcactggtgggagtgtttcttagcatgctaatgcattataattagcgtataataagcagtgaggacaaccgggggtcactttcatcaccatcttggatttggtgaggtttggccagcttctttaccacagcctgctttatcagcaaggtctttgtgacctgtatcttgttccaacctcctatgtcattctgtgacttagaatgcctaacctcctgggaatgcagcccagtaggtctcagccttattttacccagtatctatacaagatggagtcactctagttcaaacgcctttgacagatgtgttttcgtgtatgcaaacaatgattgagatgaggtttgggttcttcacaaggagcccagagcctgtgcccaaggctgtggccagatcctctggtttacacagagaagatctcaggcagagaaaaggtgtaaagatgcactgttctccttgctggctgccggtgacctcttttccactccaagaagctcatggactcagggaaacaagacagcctgtctcaatggctcagtccacacggacagagattgaggtgcaaggggagggagtcccttaatccacacactgctcacactgggacagctgcgtctccacttcaacccagccagctctgccctgcatgagcttggccatgtgagttcagctgcataccgactgtgctctgttgcaatgctgcctctttcttttgggctctgaaaagccgccccctgaggctcatgattgcccttactttaaagatgaggtcaagcacatttggccgtcactcaggagatcctcttgtctggtccttctaccaagaatcgttgttctgcaccagctgttgcaaggctcacgcctaataaataagcccgcgttctgttttgcccccagctgggctgtactacatactgtcctgacactgaccacctggagttagcaccagacgccacaagtaaaggacagagccctccacaagactgactttacttcagacactggccgcaagtggggtccccaggccacctgcaccgctggccaactggctacagagtcaggtgttcctgtgaatctgtagccagctggccagcagtgtaggtgctggggcccctccagtttgaaaatttgttttaaagatgcagaacacaggcaagtactatacttaaaattgcatttttattagaaaggatacccatagatagaacagggtctgggagggtcccaaacacaattttctcaggctctgggctcctggtcaagagcccaaacctcatctcaatcattatttgttcacatgaagacacatccaatgaaccgaagtgggcagcagggcaacgccagaccctcggaaaggcagtggggcatgtgcatcttagaggaagagacaaagcatgagcttagcttgattcctgtatcatctcatttaattctcacaaggttccctaaggtaggttccatggtacctccttcatggagggcatatcaccctcccagcagatcagtgtgttcaactgggagctcctctgagcctcagtgtctagagtttttattaggattgcattatgaattggggtttgattatgagtaatcaatgattgatgattgattggctgcatgacagaactcaatctccaatcaccctcccctcctctcttcaagtggttggtctttctggtgaccagctcctatactgaagctctctaggagcccaccaggacccatctcattggcataacaagacatgcctatcactgtggaaattccaagggtttttgaagcactgtgtctggaaccaagagacaaagaccagatatattctttttttttttttttttttgagatggagtcttgctctgttgcccaggctggagtgcaatgacatgatcttggctcactgaaacctccacctcctgggttcaagcaattctcctgcctcagcctcccaagtagctaagattacaggcccccacaacaatgcccagctaattttttgtacttttagtagagatggggtttcatcatgttggccaagctggtcttgaagtcctgaactcaggtaatctacccgccttggcctcccaaagtgctgggattacaggcgtgagccacagtgcctggcccagatatattcttgataccacagcccattaccaagtgaatacagccttgtaaagtgcaactttcaaacttactttgggatccattttattatctctttactagttgttcttgcatctgtcagttccattctgatttatgccctcatttcttgtatggcatcctaaaccccctctctgcataaattggggtgtaacagatagattattgcaggcccttccttcagctccgaaagaacatgcaacataagagctggaacttcctacataggagccactgctagcctctaggagccacagccagcctctaggagcactttctcaacggcccacacaccatcataactgcagcctgctgcagagagctctacaaacttccgtcgttgatctgtgatctatgaggcaagcctcctctccctgtgagcagacagcggtgtcagaggtgtgtaaaccagagcaactccatcttgactagggcctgggaaaaaagaggctgagacctactgggctgcattcccagatggttaaggcattctaagtcacaggataagatagaaggttggcacaagatacaggtaataaagaccttgctgataaaacaggttgcagtaaggaagccggctaaaacccaccaaaaccaatggccatgggagtgacctctggtggtcctcactgctacactcccaccagcgccatgacagtttacaaatgccatggcaacgtcaagaagttaccctatatggtctataaaggagaggcatgaataatccacctcttgtttagcatatcatcaagaaataaccataaaaatgggcaatgaagaatggaatagccattcttcattcctttacttcttaataaacttgctttcactttactctatgaactcaccctgaattatttcttgtgcaagatccaagaaccctctctgggggtctggatcgagaccccttccctataacagcaatggggacccacactgtgtgacacagtggtgctgtcccccaggtgggatgaatatgaaggaatggggtggcagctcactgggccagcccccagcccccaggagaacgccctgccatcgttgtcccaactgcaggagctcagggagaggagaggaaggagggagagcactttctcagtgcccaggccaggaggggcatcacgagtggggtctgttgggagtgaggacccaccttcctgatcccagagctgcccactcccactgggcccagcataccaccctgggagcactgacttcccccagggaccttcctgacatggggacagggaaaggcactacagggtgaggtgggggtgaggttctgttgacaaccaagtctcctgcacagcttggtccctgaaacatcccctgaccccagcatcaagctgaacagagggtaaacgggatctctgtgtgagggtcctccatgccacggcttgggcaaggccagaagctgcatcaaatgtcagatagggaagtcccagcccaggcaagaaggaggctttaaaaaaggcttgtgtttgttggcaagcagcagtgccaggcctggcttttgatcaaaacatcctagctgttggcagagacaaaggcaatccctggaaacagcctggctggggagagatggaagagagggcagggttgggtaggggggtcagctctggcccctccccagctggctcacagcttcctaccctcagggcccgaccttgctcctccatggggagggagggggtacttggagaaaaggctttaaatgcctcacaggcagagttagcaatcaggtttcaggaggaaactcacagattgatggggaagccgtcaaatgcacccctggcagcaggagagtgtgaatgggaccgggaacagtgtctgcctccagccaggctgcccccttctcccgactgcccactgcaagggcagtcagagggtcttaggttctgacacacagacacacgcagacacacacacactcttcactctccactgcagccatacaaaatcacattcttggccagtcatggtggctcacacctgtaatcccagcactttgggagcccaaggtgggcagattacttgaggtcagaagttcaagaccagcctgaccaacatggtgaaaccctgtgtccactgaaaatacaaaaattagccgggcgtgctggtgcacacctgtaatcccagctacttgagacgctgaggcaggagaatcatttgaacccggagggtagaggttgcagtgagccgagatcgcgccactgcctgggggacagagcgagactccgtctcaaagaaaaacagaaacaaaaacaaaccaaaatcacattccccaccttttaccagaaggcttgctcacacctgtaaatggagtgtgcctcctctccacctgtttctaattaaagatgtgtattttctaaggcaccacccgccacctggcaatgtccttacaaaagagactgctccctgctgcagggccagggatggcttcagcccaacgatgctaagaatccatggtgacagagacagacatggggccgggatcccaggcccagcctgcgcttggaagcacctcttgcctcactatggtgtcatagaccctcagcctgagaacagtctcaggatgctgttgaactgagacttggactgagaaaggaggccaggggatagactggagggtgcttccgagttgaggtgttgtcctgaaggtcaacagtggaggactagccaggaactgatcacgccagattctataccagcctggagcccacctgggctctcccggatgctgctaatcaggatggagggtaggggtgcttgctgcaggtatttagaaggctccccagctaaccgctcccaggcctgcctccctgtggatgatttgcaccaggctgttttgtcagcctagcactgccttccccggggaatagtgaactcacttttgcagagaagggatctctcagagggcccttccgaggcactctctggtgtctgcccaagctcagacaagatgcatagcctggtgcctgccaggccaacgggggtgactacttatccagcagataagtgtgtgtgagcagctctggggacatggggcaataaggggaggtctcatgtgtcaggggcagccaggaaatgttctgttaagatgtcctttctgttcctgagattttctagcaccagcagacaccgtggccaccacccctctctccctaccccatactgcagacgttgggagtctgcggccatgtaggatgcagcccacagctttgtccccaacattcatgaaggaatgcatggtgtgtcactgccattctgagataggagttcagcaggactagtttcccaggaccctgatgaaaaaacaggatgcagtagagaagctggccaaaacccgccaaaaccaaaggtggtgatggaagcaacctccggttacccttactgctcctaagatgctaattataatacattagcatgctaaaagacatacccaccagcaccatgacagtttacagatgccatggcaactcctggaagttatcctatatggtttaaaaaggggagggaccctcagttccaggaactcccagctcctttccagaaaaactcattaataatctacccgttatttagcatgtagtcaaaaataaccataaaaataatcaaccagcagccctaagggcttctctgcgtatggaatagccactttttattcctttactgtcttaataaacttgttttcactttgctctgtcagctcactcttgaattctttcctgcacaaagccaagaacccacttggccttctgggctgagccccagttttggggtttgccctgtgacaattccatccccaggttcagggccactgagacacgcattcggaactgtccctagcactgggtattggctgccttggtgaccagggctaagcgttcactgtggccataattagagctgggacaaatggctattaggtcctaattgtcagcttttccaaatctggaaaaaagccacgggacagaattcccagaagggaattgtccccacggactactggggacccttctcaaggctgtgggcatctgtttgcggaactgtgtcatggaagccacgtgccatactaagtttgaagtctgagccaggctctcctctaaagcatggctgtcctcctaggtcctcctaggatgggcatcctggccaccccttcctttgagcttcccccagccttctccaatgtgttttctgcccagctaatgccccttgcctaaccctggacttctcactctcctccaagcccattccctctgcatttgatagccacgtacctggcccccaggctgtgactcactgttatctccaagcactagagaattttctcctgtcatcttcagcaacaagtggttgcagttttcattgcagttttcattataataagaccaaaagaaaaaaaaaactgtagctgagaaaatagatgtgtgctttccaccctacactgagaacatcttgacatttaaatccaattacccttttcccattcttgatgaggatatgacatgctgctagaacattctgctagataaatatatcatattctctgactgctcaaaacctcccaggggtggatttgggggttctgtgacccccgttcactatcggcctctgtgagaggacagggtcgtggactggctgagctaaaaggccctgaaaatgtttgcctggaaaaattttgcagcatttgacctctgcctttcactgagtcattaattgggagaatggaacaattgcagaaacagggggacttttgtcctttgtatcagatctgtacacattcaaaccccccatccctgggctttcagcaaaacaccacaaaccagtaggccctgggcagagaggtattaattaagcacattcccatattacttcaaaatgtctatcctcccagaagcaaagagtcattgactctaaatgaagcagaaagccagaaaggagcccttacagctattattctgctgtaaatattagttctcttttgacatctggagagagagagtgcaagttttttctttttttcttcttttgagatggagtcttgctctgtcacccaggctggagtgcagtggtacgacctcggctcactgcaacctccgcctccagggttcaagcaattctcctgcctcagcctcctgagtagctgggattacaggcacacaccagcatgcccggctaatttttgtacttttagtagagatgaggtttcaccatgttggccaggctggtcttgaacttctgaccgtgggtgatccacccctctcggcctcccaaagtgctgggattacaggcatgagccaccgtgcccggccggagtccaagatttttagcaagtgtgcatactgttctgtggctagagagggagatggtgggtggggaggatattgccaggattaaagccgggaggaccctgcatcctttgccttccagtagggttccccagtatgggccgcatccacagggatcaggcaaaactcccccgccctccttctgaaacccacttaccatgtaaagttacacggttttaacttgactctgcatccatttccacctgcagagaaagaggaaaatgaaagttctgggagatttagaatctcattgtaactgttaatttcagccaggatggaatccctttcctatccttgtcccagccatgactattatcatcctccgttgacctctctcccccctcctccacaagatgaagtgttaacaagcagaggaaaattagctccactcccccagcacaacatcccctgccctgcagaagtcgtggaagccataagccatccctccctgccttcctcccccttcatcagggctgagtggccagttgtcttcctcccctgaggatttcatcatcctcagatatcccagagagtgtttgcagttgttcatcctaaattacactgttgttttagcctgttgtgtgctcagagctgattaataaacagaaattaagtcacttatttactttttgcttcaaatcacagtgtgcgactcgagtggttgatatctcactgatatttgtgaatgcgtggatgagtgactggatctgcttgtgtgttgaatggaattcaaggttccttccatcagtcccaaaacatcattcctaagagctcacatgtgcctgtctgtttttttacaaaaacaccttttgtctcttctaatagtccctgaatgcttaggtaagagtggagaatgagagctctcttctctgacatccaggctctgggcatctctcaaaaagagatggtcaaagaatctgatgaggtctgctgaaaaggaagggtgccatagagaaccagaccagcccccatcctggtgagcggtgcctcctcacacaaaaagctaatggtttgggttggtgtggtcagaggagagcagctctcagagacagaggtgaggatggaggccctttcattttcctggtgagtctttccatactactttttaaaagaaagtcggtactttaaaatattttgtaagtcaatttgtccaggatgcctgcaagttttcctggaatttgatgcaaatacgaggctatgctaaagccattcagcaagctgtaggagccccaagtggagaaactcaaactagttcacaggagcaaacatcatgcagctccctccaaggctacatcactcgtgggttgtggtgtttctttgtggaagtccccaagctcttagggtgagagggctcttcagtgacgcccagggacctttctcaaggctgtgggcatcggtttgcagaaccgtgtcatggaaaccacatgccatactaagtttgaagtctgagcaactgctgggctgagaagatcttcaggtttccctgtggccgtgcagcctgtgtggcatctgccatgcaaggagggatctgggacaaagacagcttgctggactgggtcacttcagggaattcatggcaatagctttcccagggaaaggagaatcaccctgaaacagacccagactggcaatgtaagtcggactgtcataccactgtgttgaaactgcagcacgaagtttctctgcctcttctttctctgtttcagctctctgtttcaggaggttcagcaagccctaaaggccattacctggccacctacctatcttccccactagagagtaaacctctctagagattagttatttatctttccatcagcccccagaactggcatcatatgggacagtgcacacacaagtcttggtttctgaacttatcggcatcttgtgggggctgtccatggtgttgaggccccactgtagtcatttcagttaatcatataaatggccagaacctcacgggttatccatggtgttgacagatttcacaccttacattccccgggtcctcctatcccagagaacagaacctggagctaaacccttagagcggggtatcattgggagctgtccgtggttctgaaaacagcactccctctccttccagttgcctgagctgctgcggcagggtcagaactgtttgtggtgtcagcctcgttttgatcagctaattgccaattttctgcttcttggtccagcttagaccccagccagaatctggcctgctgctgctgtcaatcatgctctgaggtacctacatggtcctgcttgtattgactctgcctgtaacgtcagtcctgccaggccctgaccaaggactggcctctgactgcaaggctgcgttttattccagcctgttgtatgtcaggttccctggaaagcagactgaggcagcgatttgcactcaggaagcttgttgggtttatattatgacaaagaagagttaaaataactttggagaaaaatataagtgtctgctgtccactgcaagtcaacatgaactgtttctgatagtcctttttgacagggatggaaaacaacctatttttcaaaccagtggtcacacaccacatacctgaggccacaaacatcttccctagcaaatataccatcatcccaccaacatggtggttgcaactggggctatatcttgatagagtttatgggattctggtgggacttgcgtgtcttttgtaggactggactggtgaaattccatggtgatttgatggtgatgactactcctgcatccttgaggtcttttatcaagcagagtcctgtggatttttttttttttaaattgtgctaatctctatgagacccccaggaagtaatattgcctttgatttaatgtctagattcatgggagagggtcactgtcaaaggctggcattccctatggtgacggtccttatcccacagatcaaggacatgggggttttgccagctgtcacatctatctattcggattatacatctgggaactggggagaaatgctcgccagatgggagtctgtgaacccaacatgagccaggcttgggtcatttattacctggtaccctatgtgccctcactgtatcagggtgcaatggcaacacttccagttctcaggggctaagaccccagatgtaaatgtcaaaaaaaaatctagaaatgtctgagtgttctccttccccaagtgtacacctgtttaaccaaatggctgtgggtcctgttggggaaagactgagaaaacattcccatgtgtatttgccatgatgccatggggttcttcttggggatgtggtctctcctttggtcactgagttctggatctgaaaactgggtgtattagtttgcattgtgtttctataaaggaatacctgagactgggtaatttaaaagaaacgaggcttatttggctcatcattctgcaggctgtacaagcgtggcaccaacatctgctcagcctcaggaagcttttactcatggcagaaggcgaaggggtagcaggcatgtcacatagcgagagagggaacaagagacatgccagactcttttaaacaaccagttttcatgtgagttgacagagcaagaactcgctcattaccatggggagggcaacaagccattcatgatggctgcacccccatgactgaaacaccccaccagactccacctctacattggggatttcatttcaacatgagatttggaggagacaaaacatccaaaccataacagtgggcaaagaactgtgccattttcttgggacagctgatcacccctccttgatttgtttttgttgtatatatcggcttgtcgaccacctgactttcttgttttttgggatgccatgttttggtgaccacctccatagctctctgcagatcagcccctcttggctgctacaccaacattgctactcagtaggacaagtgtgcacactttggttatgatggctaagtaccaccgtgtggtttctgttattttacaatcctattgtcccccatcagtctcggggtgtccaggtctgtagtggcactgcctacattcagccctgtcctacagaggagaggcactgctgggcttctcactcatgctggtgcttcctgaactctctgggctgcagaggcattctgccctctgcaatataggctggtggccctctgttcattgaagacactacagagatctctgtcctacaacacaacatatgccccctgatcctccttcccctctcaccagtgtgttctatattgctttagaaaggggtgggggtatcttctaggcagtagtggattttccagctttccctagcatgtccactgtagcataaccacctttgggagccttttgatctcttcctgcactatctaccacagcaattctttttttttttttttttttttttgagacggagtctcgctgttacccaggttggagtgcagtggcgcgatctcggctcactgcaggctccgccccccgggggttcatgccattctcctgcctcagcctcccgagtagctgggactacaggcgcccaccacctcgcccggctaattttttctatttttagtagagacgggatttcaccgtgttagccaggatggtctcgatctcctgacctcgtgatctgcccacctcggcctcccaaagtgctgggattacaggcgtgagccactgcgcccggcctaccacagcaattctatcatccctgcttcattgagtgtgggcattgctttctgcacgtatctgagagccatctagcagcatgtctgcatcgtctcctggggtcgttgctgcactgtcagatcctctaacccaagagaatcctcccttatcaattactgctctatccaactttgtgttctgcttttttctttttttctttttttttttttgagatggagtctcactctgtcgaccaggctggagtgcagtggtgcagtctcggttcactgcaacctctgcctcccaagctcaagtgactctcctgcctcagcctcccaagtagctgggattacaggcacctgccaccacgcctggctgatttttgtattttagtagagacagggtttcaccatgttgaccaggctggtctcgaactcctgacctccggtgatccacctgccttggcctcccaaagtgctgggattacaggcatgagcccccgtgcccagcctctctgatctcttgtctaccccgcacaccctgccccagcgtcaaggtctatgtgtactctcctggttcctgccaatacctgatttctggatccttcttttcttttggggtatagttcctttcttcccttagcaaatctagcacttccccagtggggacatgctgtgatttaaccgtagttattggtctagtggagaaaaggtgggggcagattctgaggaaggcatgtgttatgttgcaggacagagacctctgcggtgtcttcaattaatggaagaccaccagcctgtattgcagagggtggcgtgcttctgcagcccagaagattagaggaaatctgggaattcaagactttcacaggcatcgacctacagtccccaacgcatttctcagggtcctgttccttctcagccaggtgcctgccattgccaagagtcacccttcagaagctggatactcttcctttctccccttcatttttttttctttaagagacagttttgttctgtcagccaggttgtagtgcagtgctgcaatcatagctcactgcagcctcgaatgaactcttcggctcaagcaatccttccacctcagcctcctgggtagctgcaaccacaggtgtgcaccacaacccccacctaattaattaattgatttattatttatttatttattttgagacggagtcttgctctgtcgcccaggctagagtacagtggcatgatctcagcccactgcaacctccacctcccgggttcaagcaattctcctgcctcagcctcccgagtagctgggattacaggtgcctgccaccacactcggctaatttttgtatttttagtagatatggggtttcaccgtgttggccagggtggtctcgaactcctgaccttgtgatccacccacctcagcctcccaaagtgctgggattacaggcatgagccaccatgcccagcctaatttatttttattttgtgtagagatgggctctggctatgttgcccaggctgatcttgagctccagccttaaagaccttcctgccctggactcccaaagtgttgggattacaggtgtgagccacagtgcctggcctctgctactcttaagtcttgagacctgtcctcttgctggaggtaagagtctctatataggctgccacagagttaattgccagccaatgccattgttcccaaattactatttgccccatatttcttagcctccagatacatttttttacatgccagggcattttcttccactggtacgccatcctagtttatcatcaataaacattttaacggaggcattactgcctctggccttgtgccacagctgcctgtgctccacctaccaccaatgctggggacctccttgctggctggttggcaggtgattcaaccctaacatttcatcttagcatctgctctctctgccccactggcactgactgtcgggttcctgggaaagagactctgaagaagtgcaggaggtgaattgcacggggctgggagggaggtgccctctgatcaacacctgtaagggaacgaaggaagcaggagtgagggcaccgggtggggatttagtctgccagtcccacagggagctctggagctgggatattcccacagaattgacctgaattgatgcaagggggctgtgcctttataccacacatcaactagtgtctggatgcaggcagccccttgggtgaggggactttgtccagctgagaccactctctggagagagacccagccaagctgcagggctgtgatttcacaatctcacctgaccccagcctccctgcacccttcacctctggctcccagcccctgctgtcctggctcctccattccacatgggacaaggagtgactaaggtttacttgactggggcggagacagtttttccaaattcctttgcttattcaaggatcattgaaaattaattgtagctggtgttattgaactcacagcagtctttagttttataaaagccttttccttccaagtgttgccatttggtgttactgagatacaagcaagatgtctgcaaaactaaaatagcatttttttaaaaaacatggcactttagagttctaaaatatgttcacatcgttttttatcaatttgattgaggtgtaatttataaacaagaaaacacatgcattgtttatcaaatgtattccatcaccccaattggagacgtgaaacatttcccccaccccagaacattccctcgtgttcctgctcactcactccccgcaccgcccccggcaaccactgatcttattccatctctagagattcattttgcctgttctagaattttacataagtgagatcctacagtgtgtgttcctttatgcctggctgattttgcacagcaaaatgtttgtgaaattcatccatgatcgtcatgtatatgagtagttggtgtttttcttacaggcaagcagtattccgtagaatggatgtaccatgttcatttatcagtttgcctgttgatgggcatgttctttgagtttcctgacacagcatacctggacacaggccatgttgtctttagtgacattcaggcaggaggagtgacctagtcacagccatgcggccaggagttagtgggaggtgagttctgcgaagcagggggcctgacttcactccattccagcgtcacctaacaaaagaccctagaaaacaaggatctggccagataactggtacattttgttctttttttttttcaaggcatttatttttccataagatgctctggtcattttctttggatgctacttgagttagcatcctgccaagcaatatgaattctcctttttaaatcagggcgatggtaattgaggggcagacctgcagagcaatcggtttgggcacatgcatgtcaaacggactatatatcatgacatcagacattttgagaaaattgctgttcctccctgaatgtcaagtcataaataatttcaggttggggagagctctggtaagcatatgtttgactccagggaatggcctgtaaatatggtgggccagagaataaagaacgagggggcagatttgtggggtcacttctggtctggaccttgctataacttgttgtagagaagccataggtgccccactcagacacacttcagcgggcaggtgcgcccttcccctgctgcagttagtggggacagctaattgctcacagctgcacccgtccttagagatctgacctcagctgataggatactcctcttctggaaggcgacaccttccccctggagttggcctgcaacccattcacatgctggtaaaccccttctccagggaggaagagaatagagccctgatttgtagcacttgccaatatctatggtgtaaatactcccactgcatccagctctaagctaccatgtaaaaataaacaatacgttgcttaggggatatagacatatgccacacacacatacacacacacacacatacacactactaagaagagaaaggaatgataaacacagaattctgtgaagtgattaccccggcaggagcaggagagggctgtccaagaggggcaaagagggagcgtcaatgatattgatagaattctgtttctgaaactgggtggtgaatacctggctgtttgttttcttcgtctttatagtgttatatattttcttttgcatgaatgaaatgtttcatgacaaaaaacaagtctaaggaaggcttttaagctttgagatttttttttaactgacacacaaggggggttcctagctctttgtggaggccgaggaggtggctcagcgggtctcctggctcccctgcacttgcccgctgggtatgatgacaaagtccacacttctaatgagttctggtggagaaggaacatggcctggggaaggagattttcctttccctcaggacaggcaggaagaggaggtggatgaggggctgtccacagagctgtcccgtccagtgctccctcctgccaaggacccaggggaatgccgcctgccactcacccaaagccaggctgttcgcactgtctgatccacggcatctagggccttaatcaatagtcatgtagctatgccccaggcactcgccaggcccaggcactcagcttccactggatggcggtgagctcagggaccctccacatcccccattatcatctccactctccaagggcagaagtgcaggacctaatgggtccgaacctgaccaagtccccacacctggtgagaagtggagacacagcttctgccaggacagatggggcctgcagcccatgctctggccatcacacagggctacccgctcgttggtgccagcgccgctgggcaggctcatggccgtgtcgccccaggttcctttcccctgagccttcctggcctgaggttccacttctgctcacagcttctgctggggtcccagctggggagggggagatgaaaggtctggcccagatctgggacccagggtctcttactgtctcaacatggtgttgggggtggctcctgcaggttccttcagcaagcccacaggcccggctgctcaccttgtcctctattgcaggagacgcacacagccttggacagtaagccctgatttcccattatacagatagtgaaactgaggctgcaggcaggtaaattgctgccgctcctgggcccttaggaggctctcacagctcagatcctcagtgtctaggccactttgcttcatccagaagccagtgcagtgaggaaggagaggccacaccatggataagtgtgtgacaggccttggaggagaaggcaggtgaaggcatcaggaccgaaggctcactcggaggagagcctcaaggagtgaggctgggaagctcccacccaacaggcgcacacccctgagggcatcagaggaattcaggacgccatgtgagatgaggcctgggtggtgccagagggacagcagcaaggggggcccccagcaggagaggccctggtgggcagaaggggtgtgcatgccccagggatggcagcaaaagcagctatgtccggggctcccccacctcaccacaggtcccgccttgcagccatgaacaaagctctgagggaaagcagcaggtggctaggagagcacacccggagccagggacaactgagtttgatccctgagttcaatccctggctcagccactggccagctgtgtgaccttagtggctaaatatgtgtatatcacagcttcatcagtgtcaagctggggcaaaataataacctttctcccaccagccacccaccatcctcctaccatcccccctccatcctcctatcatcccccctccatcctccccatcatccccccatctccccaccatccccccaccaaccaaccaccaatctcatggccttctgtaggggccgatgctatgagctcttcacaacacatgggtggctggaatcagtgggtgctcaatgaaccccatcacagatgaagacagcggtgatgaggcacagggcagggtcaggctctgcctctaagtccctgggtggtcactagggccagtaacttgggcaggtcctgcagccctcagtcttactgctactcacccacctccctcccaggcactgtgggtgctagaggccagtgggtgcacctccctgaggccccaggctgctgagccaggagacccagggtcaggctccaaagggaggaaggacatgtgcccttagctatgggtgggttgtatgtcacgtgctgtgcgctgtccagctggcgcaccaagcacccagctcatgaaagggtccgggtcgtggccctcatcgtgcagcagccattggcaggtgcgttgtgccttgcttcctgcctttctcctgtccacaggctgcactctctgagtcctccctgaggcctggcgccccagctaggtgtggtccaggaagctggcatggctgggagaccgaaacgccctgagacgggccagaggctcaggcctggaaggaccctgagaaggcagggcccctcgccaagggggtgcaacaaggtggtctggaacccaagagaggagggtgacctaaggggggtggtgacagcatgaggtcacaggggtcatcaagtgctagttaagcagggtcagcagggttgggaggatgcacttttgggcagggtcctattacttgagtagggtcctggctgagttcaactgctccagcctctcctaactagccgtctgctataggggctgtggtcaccagcataggcacacgctgggacagacctcagggtttcctgctcagtcccctctggggctacccccaggaccccagggcctggatctgagagccatccatccgggaggagaagccaccagagttggcacatccctgtgtcctgggccactctgcctctgcatcccacaccccgcccctgtatcccccacccctaagcctcgggataagccatccctgaaggctgctggaggcgagagccactccccagtgtccaccagccgctcagtttcccatcagggtccagaagtattgattctcttaattggttgcccatagggaaccaaagaataaaaccaggcaaagcaaaatagagcattctttttcgttttccagaagtgtgatcagcaaagcctcacggttctcttacaaggccccaggcaccagccgcccacccccaacggagggaagaggcagtggtgggccctgggccaagcctcctggctggggcatctgataccctttcagaccgagcctctccaggctcggtccaggctcaccactggtacccctcagcagcaggcagatgcacccccacccccacccagccctgcaaccctcccagccaagccagggagggcctgaggatttcattatgagctcagattatcatcaaggacaagggggagtgatggggaagttacaagctctccttttaataatgaatcccatttcctcttggagttggttttcttgcaacagatgctgttgcagaaaatggaacaaaatggaaaagataaaaaggcaagtcattaacgtggccaaaaagccttcccagcagatgttggggatggcggggcagggtgcccacagcctgcccaccgcaccctcgcttggcccggctgaccagctgccacggcagggacccatatgttctcaggattcacggcttggctcggtgttgggaagcacagagccaccctcccgctgttcaataactgatgaccatttttctccaattaagctgaaattgaaggatcctcagacgtagacatccaagggaaataattagtgcttaaaatgttaattgtgctcagatatgcctgtgctgtggcggcagcttgccagtgagcaggcataggtaagtcaccttctgccctcaagcagcccccatcaggcaggctggtctccccagggacccagtgtgggcagcccaaggccaagaccctggcagcttttctgatggtggacactggcttaatgatagtgagacgttctgtgaaccccccagcctcctgcctgaccggcccaccgtccccgggcactggcaggcagcatcagagagtggttacagcaaggacatggaatcagacagctcgggcctggacccaccactctgccagcctacctgggcagcagtgtggatgagggtgacccacttaacctctttgagactcagtgagtgccctcatgccaaacagggatagtaaaacctatcctgctgaagcccccacgggagcgggatcatttctctgtccagcctttaacacccctcagcatggggcctgcggcaccagctcccaaatgaacaatgacagaatgagtgttttccctccaacggcgccaggaggggtcagggatcggggtagcagcgtggtgtttcccccttctgggcagcggaggggccctgcttggccagccattcagaccccaccaaccctgcacctaggattggatgagatttcctgcccaggggttggagtgagatttgctgccacagctgcctgagccccaggacgaaggggaggctccgcctagcgggtattggacgccccagctgcctgagcccgggagccctgggatgaagtaggggctgcccatgccaaccgcagttcccccaacctgcccgccgcctagggggaagcaccaccccctgcccggggagaggaattcactcccacagggattctcctgctcattactcgacccacgcgtgagccaggcttcgctctctgccaagatgacacgtctaagaggcttagtcttctttatgctgtggatcctgaggaaatccacttagatattctgtgttccctgatccgccacataagattcctttatctcttgttgtcatgggaagtatatattaactgattaatattaatgtgttggccgattaatattcatatctgaaccgattcgtatttcacaggcaacgatactgaggagcatggcagagcccagacagctgtcggttttaggcagttccccggggagtcgcagaagtcgcatctgacccttcccgccgccccacgttatggacaccctctcattagcagtgtctgtcagggctggcatgcaagtgtgtttggactctgattgtggcaattaaaatccttgccatccaagacagcatattttatcgtttaaatagcattttacattcttctaacatatttccccagtaacattgttaaattaggtgataaaaggttatttttgcttctgaagttgaaatacgttaccattattccttatctgcctggaattagaaaggtttcagaattagtgttccaatggtttcattatcaaaatttgccagactttataaaacaaacaacaatttttttgcccttgtgttcaacaaagatgggcaaaggctttgtcttctgacattggagattgctttcagcgttcggtggagaaagaagccacagccttccctgcagccaggggggtgcactgggggctgggggaaggctcgcttgcatttgaattggagccaccactgtcacctgtgccactgcctgggcatcagaggccacacaggtcagggaggtcactcttgcccgtgggaacggcacagccagagcctgcaccttcaccagggggagcggccaggagcctgcctatgtagcctgcatgtagcttctccatctctgctcctgtctccctccagcacccctttccagccccagccctttctaggccccatctccaatcttttcttcaggacttctaacaccaccaactgtcctccatctacctattatcctcccacccaccatctccccaccaacttcccaccttccccctaccaaccacccaccttcctcccaccacccaccctccatcctcccaccacccacccaccatcctcccaccacccacccaccatcctcctaccatcccccctccatcctccaccatcccccatctcctcaccatccacctgccatctcctaaccatcccccaccaacctcacaccatcccccctccatctcccaccatcccccaccaacctcccaccatctcccaccatccccccaccacccaccatcccccctccatcccccaccaaccacccaccatccccccaccacccaccatcctcctaccaaccctctccatcccccaccatcccccgtctcctcaccatccacctgccatcccccaccaaccacccaccatccccacaccacccacacaccatcctcctaccatcccaacaccacctacccaccatcccccaccaaccacccacccaccatccccccaccacccaccatcctcctaccactacccctccatcccccaccatcccccatcccctcaccatcccccaccaacctcccaccatccccacaccaaccacccaccatcctcctaccatcccccctccatccccccaccatcccccatctcctcaccatcccccctccatccccccaccatcccccaacaacctcccaccatccccacaccatctcccaccatccatatgccatccccacaccatctccccactaccctctgtgtaccatcctacctgacatcagtgtgccccccgtgtgcatctccccatcatcagtgcatcacatctgacaaggaagacacccttgtgtggtacaaaccccctcctcactcacacttggcagtcaagtgtgctatgagctgggcctggggcctcatacctgctaatggactgctttatccccgcacctggcatccccaagtcacccgggtccatgacctcttatgagcaaaccgtccttgctacagcactctaggctgcggggctcttccgagaacacatttctctctagaagaagcacaccaggcaggatgagggactgttctgctgggatcaggggaccttgccgtgcatcttaaccctatgcctgctctcatcccctttccctctgtttttggtttgatccaaggacaggatcgactttaccaaagaggaggctcatcctctcccagacgtccaaccaggatggagctttagcttgactggtgggaacagtccagggtgctgtgtggcagcccctcaagtgtttgcccacctgcatgcccgctccagcctctgccacgtctcacagggacaactgtcccagctgtcagaggcaggggtgacagcctctcaaatagactagctaagaacagagctgggagagcaaggctaccagtttcctcctgagcccaggctggggtccatgcaaatctgttgtggatgtgaaccttgaagttgattgcagatgatgtgaacctctgagatcctgctctgcagggccaggtcttgatggaaaaggatccctttctgctgagcacctgagtgagagatgccggctcaggggcacctgtctgcagcctgatcctccttcttccgagcagctcagccctgcagagccatcctagcctggcccatccttgtgtctctcacttgcggatgcagcagagctaaaggctggaaatgacattctcaggatgcccaccacccatgcaccccccaggggctcaggatggtgccttcctgtggacttccggatttccaaaatccctgctgtctgcaaccacagattttcacagaagcctctggcactggaaaccttctgatgcccctgtcaaagctcccaccgcctgacacacctgtgctgtgctcaccccgccccatactccctgttacacagcagcccttcattctgtaatcaactcccagacaaacagaaaacatgctagcagccgtcgtaagcatcccccatgtgatttattgccatcatcacaatattttgtttggagctgtaatcctccggacataaatcaagtcattagaaggaatgacgtttaatcctggggaagatgctgtggtgggctgagcagcagtgaatcacctctcaccctgctagtgaatcattcattctagaaagaacggccctccacacacctacctggcccgctcctcatccctgccacgcgcaggcgtgaaagacagaaggcacaagccaggcttgtttgtttcccggaatagcacatttcacaaccgcaaagaggtgcccaaaacacatgcccggtgctccagactggagccttaattcctccagaaatgcacgcagcctggaggggctgcctctgtgtccgtggtgggctctcttcgtcccgagagcagctgcgctggttggacttcaaaggaagcaggaaaacagctcagatatcttctttagctctcctttcacggtgaccccagacgccctaccaacagccattacatgggagcacattccgtttgcaaagctggcgggtctaattgcagggcctttggtggagatgtgcaggcagaggctaagcaaagagtttgaggccttgaaaggggaattcagggacctcgggcactgtcttccaggagcccagtaagctcctccacccccacccaggcaaacaccggcttccagttccctgcaaatggcacctctcttggagcaaggagacacccccaaagtgctggagagcgaagaacgggaagggggttgggtcttggctgacggattgccttagaagacttcatgttattgaataacgtgaatactgtgatgatggccaattccaggtgcgcatgaagatcgtgaaaataacagctatttccagtgtttacatctacttaatattctcgtgctcagagctaacgaggctggcgttaggcggtgacgtgggcctgtttgaaggatgctggaagtcgcgggcctaggttgcatggtgtgtgtctgggctgcctcccaaaccgaggtatgtggcccagatctggctaatggacagtttcacccaagctctgtcctgtttccagctgacagctgctacctgcaggtgctgctcgagtctgtctctggttcaccataagccaaggttgggtcttctcccccaagggctcctccattccctgagacctccctgtctgggggtcctggcagcatgctatgggaggagtcctccagacatttccctcaccctcacccctcatacccctgactcaccaaaccctctagccctctggctttgttgttctgcaaaatccaacatttccttttcctacccccgcccaacctgcctaagttcagatgtccccactcctcacctccatcataaggtaagaacctgaatttgttttcccacttccttttgggcctcactcttctccaagttccccagtcacctccagaatgacttctgaacatgcaaccctcaggagtctctccgccctccccactttccccaaccctgcagtcagcaccccagggctctggaggctgtacaggtatgagatgcaaagggcctgtggtttaggtgtgagtgtggtatgggggtgtggaggcagccccgtctggcatggctgtgagggggcagtggaagacaggctgtctgtgctcccatgatggtctggggcccccctggtcagcccacatggccctgtgggggctcctgctgctacagggtgctgggctgggcggaggaagagctggccattcaggatgggcgcagtggctcatgcctgtaatcccagcactttgggaggcccaggcaggtggattgcttgagcccaggagttcaagaccagcctgggcaacatagtaaaaccccgtctttactgaaaacacaaaatttagccaggtgtggtggcgcacgcctgctactctggaggctgaggcatgagaatcgcttgaaccaggaggtggaggttgcagtgagccaaaaccatgccactgcactccagcctgggcaacagagtgagacgcggtctcaaaaaaagaagaaagaaagaaagaaagaaagaaagaaagaaagaaagaaagaaagaaagaaagaaagaaagaaagaaagaaagaaagaaagaaagaaagaaagaaagaaagaaagaaagaaagaaagaaagaaagaaagaaagagaaagaaagaaagaaagaaagaaagaaagaaagaaagaaagaaagaaagaaagaaagaaagaaagaaagaaagaaagaaagagccggccattcagaagggagcagaaaggggctcttggacaggtatccaggggaggtgatgtccccacagccagccactgacaagcccaagattggcatccatactcaggtttggtgtctttttttaagagatgggatctcactatgttgcccagactcaacatgggagctcaaactcctgggctcaagcaatcctcctgccccagcctcccgagtagctgggattccatgtgtgcaccaccacgccagtattatgctcaagtttgacccctcaaagaagctggtgtaatcctcaggccagagccttccagagcttctcttgccccagcccttggctggacctgactccagcttcaaggccctgccctgggagattcaccccagctctgaaatgtagactgcagctatccagaccctcggcagggaagagccggactgacggccagagcccctgagtgctccgggcagtctctggccttgtccctgcaacctgtgaattgccagagtctctgttctgttctggtggggtggggtgggggggcacacaggatgacccctcagctgcagctgcccctcggtgttccctgagatgccagagagaagacactggagatgttggtgtaggggtgggggtgggcctggaactgtagctgcccattcactgtgcttgagtcagggccgtcacccagactccgggacccctgtgggtacagtcagtgaccatcagtgctcagccgtctgggagctcttccaaggatcagagcacccatccctgagcccctaggcagccctttgcagtctggagccccactctccccagggtgtctgcagagccccacccaggccagagcggcctgcagtgggggtcacttcaaagaagcatcacttaagacagattcacttttgtggctctttagggtatcacagcaacagctgtgacaggcttgacagctccaggccagctcggtaattgacgtggcagccagaacaatgcatcccaaggccggctggagctggaccgatcattttcttgcagctgggccacagtggtaatgaggctgccgtcctggctgcctgactccattccagggtgaagaaggacatgctgcccacgtctgcccctggagggcctgtctcagggctgggccagtgggtagggagcacttttcctgtaaacaggcatgtgtcagcacattcttgcactgctataaataaatacctgagactgggcagtttataaagaaaagaggtttcattggctcacggctctgcaggctggacaggaagtgtggccccagcatccacttggtttcttggcgggggggggcggtgctcaaagagcttttactcatggcagcgggcaagcgggagtgtgcgtgtcacctggtgaaagcaggaacaaagggtgagacttgggggcaggcggtgccacacttcacaacaaccagatctcatgagaattcattcactattacagggatggcaccaagccatgaaggatccccccatgagccaaacaccccccaccaggacccacccccaacactggggatcacacttcaacatgagatttgggcggggacgaatgtccaaactacatcaagacagcccctttatggggccaccccagcctcgggctccagcctgactcacttgcttctatttgctggtaaccccacaatgggaattcaccattatttagaccaaatgaggtgccttcctgcagagctggctgcagagtggtcaccacgtgccatgtcagccagacaagaggaggcgttgacatccgtcccatttaacccaccaggcatggtgctgtgaggtcacggctgctgagagcctggggtgggatcccggtgggcccagaaaatggcagcctccaggcccaggcccactgcctctacccctctttccctgagaagtgctggtatcatgcccccactggcccagaagagccacaggtggctgaatgagctcccacaggcacgtctgccccccgcacctctgaccagccacccctgatcccctaattccctctcctccaactgccctctggatgtctgcacttgggagacctgtagtcaggtctcctcaaagtccacagggatctgtcctcctgcgcagggaatagcatcagcattcaccactgctaaagtcagaagccagcgtctccctctgcagtcagccagtcccaggtcctgctgatgtagtggcgagttcaggccaacttgtcctggcccccaagggcccagccccacatgacatcagtagtttgaaatctgccatgatgggatttcagaccacggaaatcagcaaacactgcaaaccaggctgctccccgctcccaccccatcacccagaaagtcaggtgttcaacatttcccagcacacctccatctcccgaaatgttcttcaactctccctccactgtttcatcatcccctgggtccaggcctcaagagtctcctgcctggatagtgacagcaatcccctgaccaacctttctgctgtatctttgactccatctcagaatggtccttaaattcaaaataactccacaccctaaagctctttgagactctcctgggccttaggaggtaaggtctagtgtctttgcatggctataaagcctctttcttgccggccagccatcatggttgcccttccttccttccctccttccttccctcccttcctcccttcttccttcctttctcttttcttttcttttgagacaggatctcactctgtcacccaggctggagtgcagtggtgcaatcatagctcactgcagcctctaacgcttggactcaactgatcctcccaccttagccttctgagcagctgggactacaggtgcccatcactgtgcccaggctaattttttcatttttttttagagatggggtctcactatgttgtccaggctggtcttaaacttctggcctcaagtaatccatccatcttggcctccaaagcactgggattaaaggtgtaaaccactgtacctggccctgccttttcttgacactcttcagtctctggacccatctcttcatcccaggagccttgctttcatggtggaaggccatgaagctctgccagaaatgtcctcattaccctcaggtgccaatttattgtcacgatcttcaggagctgtcacctgcaacactgagctagctaacatgtcaactgtcccacattgcctgcaaagtcctccatggctgccatcacacatggagttgctggccagtgcctctcctccttgctagactggaagcttcatgagggcaggggccacactatcccattcctggttaagacactgtcatcagtacctaagatgctactggcccgtataggtgctccatcaatgtgaagtgaatggatacatgggggcagatggcaggatcattccgcgtggtgtactgcaaagtggaggccagccagttggtcttgctgtcaacatcccacgtgggaagcagagacagggcaagccagggagcgacactgggttgtgggatagggccacgcagttcgttctttcccatttgcagcagcaaccactagctctggcttgttcttccaggcccacatgtgttgaaggaagacaagcagccaggcacggtggcttatgcctgtaatcccaccactttgggaggctgatgcaggaggatcgcttgaggccaggagttgctgggcagcatagtgagaccttgcctctatgaattttttttttttctgagacagagtctcactctgtcatccaggctggagtgcagtggcacaatctcagctcactgcaacctccacctcccaggttcaagtaaggctcatgccccagcctcctgagtagctgggattacaggtctccaccaccacactggccaatttttgtatttacttagtggagatgggatttcgtcatgttggccaggctggtcttgaactgctgacctcaggtgatacacccgcctcagcctcccaaagtgctgggattacaggcatgagccagcacacctggccaaaatatacatatatatatatagtataaaaatatgtatatatgtatatatttttttaattagctgggcttggtggtgcacacctgtagtcccagctacttgggaggctgaagtgggaggatcacttgagcccaggagttcaggattatagtgagccatgaccacggcactccagcatgggcaacagaatgagacactgtctcaaaaaagaaaggaaggaaggaagtgggggagggagagagggaaaggatacataaaggaaagaagaggcatgatctgctgtaagccatgtgccatggactcctagaaaccacacagggatgtgcacacaaccacacactccccacccagggcacgctacatcacacacacaggaagcaggcacctgtgcagcacaaatgtgtgctgtggtgcatttcctcggcatgcctggtgtgacagaccataggacatgcacacctgatcccatgcgacatgcacatgtgtaaggggtgatgcagtgggtggcgcgggtgtgctggggtcacacacaccctgaacactgtagaggtcactgcaggctctgaccgagggatgctgagaagcaggagctgaggatctctccctgtagacaggcagggcaccagctcaggactccccttcccaacccactcagtgatgggcaggtgggtagatgtggcgcaggcgggacagccgttgggtttgtagactggctgaccagctgaccggctgactgacaggcagctctgatgctcgactctctgacagctccaagggaattcacgaccaaggctgagctgacaggaaccacccagctgaatcgtggatcctaatcactaaggcgagggaacagaatcactaaacgaaacaagtgcggtcagagccgtcaggcgctcatcggccagagacaggaagatgcaggctccgctcctctgcagatgcaccccagtgtcgctgcgctgggggcaggagctgcgctgcgggagattcagcccctgcaaagggaaccaggtgatcagcatgccaggagcagctgactttcaaccaatgggctctggctctgccccgctttgtgtcccatttggtgtgcacatttgtggatttgcaagatgcatatgtttggcacattttaccgatgaatttttagcccattttaccaatgaaacacgttcagcaaggtcaaggcacttgtccaaggtcacacagcagtgggtgtgtgcgctcagttttctctctttttttttttttttgagatggagccttgctctgtcgcccaggctggagtgcagtggcacgatctcagctcactgcaatctctaacctccacttcccaggttcaagtgattctcctgcctcagcctccagagtagctgagattacaggcgcccaccatcatgcctggctaatttttgtatttttagtagagacagggtttcaccacgttggccaagttcttgacctcagatgatctgcccgcctcagtctcccaaagtgctagaattacaagtgtaagccaccacgcctggcctgtcttctaatttttgatgtgctaagcctgcattaaaaactacaactccacatggaccctccagggtggtcctccgcgtggtccacagagggagggagtaagcctttgctctggtctgagccaaaggtcactgtgactgagtttgatcatctcagagcctaggggaagaagccccccacccagaggccaaagctggaggagagaggccaatacatgaccagtctgatgcagctctccagtgtgtctggcctgactgctgcctcccctcgaagtccacactctgaccacagagctgtcatcagggcccaggaacagccggctcctgtgctggggcagccctgccacctggaaccccacgtacctgtcccgtgtcctagggcagcaggtggccgtgactgtgacagaggctggtctccaggctgtgccctggggacccagcagagaatgtaagaagttggattttcccatgaacacagatgagaattgaagcccttgggtgaggcttttttccgggcgttctgtgcccaggagtccaggctgcccgctcattgctgcatgtgttgaaacttcagttttgcatctaatttgcatatgaacagcctgcctcagatggaggatgcagttcacagtgaggcagtcagaggcccatggggacaatgtgtccctcagccctggggcagtggagacctcacaagggcagagcctgagccggtgggagaggagccagagaaggtgtggcccggtcccaaagcaggccccggcctggcatactgtggatggtgaaaggagctggcagagccagtcttcatggccacccagccagggctgggggtggacagactcctccagtgggattgcccctgtctgcatctagccagggggctggcacctgctgcccagatgcgtgggcccttcccagctgggaggctccagccagaaccctgggcccagcttctgggaagccccatacccttcctcatgtccaaggccagctctcagtccagaaagcaccagcctttccacaggcattgatgggcattgtgccagaatgacacagatggacatgacacaggccctgccccaaacacaccgagaaccaacaacccttcactactgatcagcaggcgatctaaaccagcagacgagctgtttcttcacctccttcaggctatcctgccctgtcttcagaacatccagctgggcgtggtggctcatggctgtaatcccagcactttgcgaggccaaagcgggaggatcatttgagcccaggagttcaagactgcagtgagccaggattatgccactgcactccagcctgggtgactgagcaagactttgtctcttcaaacaacaaacaaaaaaacactcttaaagccccatgagatcacatgagaccctgtctgtactgggtcaaattgggtgcccgccccaccctcaaaaaatgctcaatcccagctccctgtgcttgtaaactgtgaccttgtagggtctttgccgatgtaatcaagttaggccactagagtgggccctttttaaaaacattttatttccataggtttctgcggaacaggtggtgtttgattacctaagttctttagttagcggtgaatggtgagattttgatgtacccataactggagcagtgtacactgcacacaatttgtagttttttatccttcacccccttcccaccctttccccgagttcccaaaatccactgtatcattcttatgccttcgcatcctcatagctcagctcccacttatgaatgagaacatacaatgtttggttttccattcctgagttatttcacttagaaaaatagtctccagtctcacccaggtggctgcgaatgccattaattcattcctttttatggctaagtactattccatcatatatatatatatatatatcagagtttctttatccactcgttgattgatgggcatttgggttggttgagtgggccctattttaatatgactggtgtccttataagaagaggagaagagacacacgtgtgcaacagctgtgtgaagacgaagcagagattgatcttctgttgttgcaagccaaggaacgcctgggctgtcgaaagctggaagagtcgaggaagcatcagcccgtacccaagaggcagtggagggagtgtgaccctgctggcaccttcatttcagacatctagccttcggaactgtgagagaacacatttttgtcattttaagcctcccagtttgggatactttgttacagcagctgcaggaacaaaccaaagcacctcccgtgatggttaattatatacgtcaccttgcctaggccatggtgccacagggtttagacaaatgccagtctttgtgtgtgtgtgtgtgtgtgtgtgtgtgtgtgtgtgtgtgtcagagagagagagagagagagagagagagacggagtcttactctgttgccaggttagagtgtagtggcgcgatctccgctcactgcaacctccacctcctgggtttaagcgattctcctgcctcagcctttcgagtagctgggattacaggcacacaccaccatgcccagctaatttttgtgttttagtagagacgaggtttcaccatgttggccaggatggtcttgatctcttgtggtctcgcgatccacctgccgtagcctccaaagtgctgggattacaggtgtgagccaccacgcccggccaggaaggcattttttagatgtgatttgctgtaaaatgtgtagcctttgagtagaggaaatgaccttccacaatgtgggtgggcttcatccaattagttgtaggcctgaagagaaaagagtgaagttccccaagtaggagggagtctcggacctccttcccatgcaagctgcggcaccaggtcttccctgggtctccggcctgctggcagattttagattgccagcccccagaatcacatgagccagtttcttaaaatcaacccgtctcgctctctcctctctctctcttcttcttcctttcctccttctctcctctccctgtctcgcttccctctctccttctcccctcctccacctctacctctcccttccctctctctttctctccgtctctttcccgcctccatatatatcacctgtgggctctctgtctctctgataaccctaactagcatgccacccccccattcagaacccttcatacttcccatggagtggagcctggcatttccctcaggcctctctcccccaacccgcccaccttctctcctgccagcaccctgcactcggggcaggccatctgtagctcagcactgcactgtgaggtcaggtgcgtgaccagctgtggggctgccccagggctcggaggcctttcttgtgtgcaccttaggtgtgggagctgcttcttcctaatgggggcatggaagcagcagggcagaggccggcagcctgggctgtccgggacaacagtgttcatcccaccagatgccactgtaaggagtccaggtggagccgaagctcagaatccgggtactgcacgtgctgaggaccaagatgcagtcgggaccttgccttcagggaactccccacccccagtcgggccagcctgagccaagagaagcagccaaaagccctggaggctccctggcctgttgggcaatggaagtggacgtggagtggacagcgccaatgggtgtggggcaacctgccagcagactcagccaccagaagccccgggcacatggaaacgcggccacacaaacggccccatcaggaaatcccaaaagaccaagaagcacgactcaaactccaccacagacagggacctgggactggcatggccgctcctgccctccttccccagttctctcccatgcctgtccctctgcagatttgactctttaaggacagtcgcagtgatgggagtggcgggacactagcatcatcgcccatcagggctcggggctgggacatgagcagccaatgcagccgtcattctcccaagagtgagccacctggggctgggggaggccaagggctcattcgaggcagttgggtcctgtcctcacctgtcagtgctgcctgtctacagggcctgaccaaaaggctgctccccagttaccaccctccatggctcctgggcagtggggattggggcttttgtgtggcaccctgcaggtcttcctcctgtgagcctagagaggagcgggcaagagacccttctccttggacatgctggtatagcctcctccccaactctgccccaaacccaggcctgatgactaagaaactggcctcacacactcatcagtctctgcctctcctcaatcaggaggcttttcagctaaacgctgagaacttcagccaatgaagagttcacactgtggaacacatttggcagtgcccataactcacgccttgtttattctcaccgatgctcttatcatagcgcatgtgttccagccactccacgcatgtcatctgtccagaaagagaaagtgcttgtttatttcttactgtgcggggggatggagctcccttacagattgtgaaccttatattgacaggagaagagaggtaactcaagacaccgaaagtggggtgtgcgtggttggtcttggattctgtcgcaggggtggaggtggggaggcagggaaggtgcgtggcagcattggtggcgttggatggaagaggaggtgggttgtggctggagttgctctgcaaggccactgatgttatctagattgtacgttttatttgggggcttgagaggggctggaggtggttatactgaggccaaaactccttcccacccataagtgccccccacggcactggtaccactgacccctggtggcaaaccttcctcatcctcgtgagcccttagctgtacttccctgagcgctgatggagctgtccagggtcctgacgtgcagcccacttggggatgtgcagacccctgccccaggatacctaaggtttctcctggttttcacttgcccagagccagcagtggtttttgcttcagcctttatctgactggtgcatggaagagcagttttcttcctagtggggacactaggttcacggcaaaggggaggtccctttagatttccttcattacgtttcttctttattcgaaagtgaacttgtagccaggtatggtggctcgcacctataattccagccctttgggaggccgaggcaggaggatttcttgaggccaggtgtttgagaccagcctggacaacatagcaagaccccatctctaactatttctaaaataaatgtaaattttttttctttttctttattttattttatttttttgagacaaagtctcactctgttgctcaggctgtagtgcagtggtgtgatctcagctcactgcaatctctgcctcctgggttcaagtaattttcatgtctcagcctactgagtagctgggataacaggcatgcaccaccacacccagctaatttttttgtatttttagtagagatcgggtttcactatattggccaggctagtctcgaactcccggactcaagtgatcagcccatctcagcctcccaagtgctgggatgacaggcatgagccaccgtgcccggcagtaaatttttaaaaatgttaaagtgagcttgtggggataggtctaatctttgcctgataagctgccgtaagtctaagggttgggaatagcttatggcaaactcaggctctacttaagatgttactgatctctcttactctccacaaggcaatttttcctttcaaaggaggaagttgcaggcaggttggctttatggacacatgtaaacaggaaatcaggagactcgcccagccccaggctttgtctagaaggaacttttcctctagttaatgccaagggctctagctcagcgagcattagagtgggacagccccagaagcttaggctcagagtccagaggtccaggagacagtgtccccctgtccagtcctcacaggtaaaatggaacaggaccacagcccactgccctccgaggctgtggggacagtgccagtgggaggtcatggcctcaggggctgcaacctcaacaagcacatggccttccatcttccccccgactggcaggatcccttttggaagtggcttctcagccccactcttggccaaatctggcatgactcatttgctttagaaaaggaatatataagcaccgtcacaccttgatgagatgacaggagtgacaagcagagtgatttcccatatctgagactctgaggaggagaggtggtttagcagagccagctgccataaccagaagaaaataattaaggaaatctggcagagtagaggaaaaccaagtggtgcagcgggtcccttctagtgaagggagctgtcatcatcggctgcgggagagaaaggagctctggaggctcgtgctgggacagctgcagtaatgatgggatggggaagaggagggggtggctgtcaaggagggaaatagactctgggcatggcagggggtggcaatgagcagcttgattctaaagactcctctctcaggccaggcacctgctacttacaccccacaccctgaagggtgcagccaggtctacttggagcttcccctcagtctccagggaagagtctagaaggcctgtttcaaagatcccccacatgcacgcatgtgcacataagcttgggagtgcccaggaagatggggacactctgccctttgcccaggggagagcatacccttgttcccagcccaaagggacaagcggaagaaagatgaaatgtgtcccagttctgcctgcatttctgcctctcttgggacttgaggaaggttcgggcaagctcagggaattcaggctgtccattccagggctgaccttgcatctccttcctggcctgctaatgactgaaggagacgtgcgggcacggcctcagccttacattgtctggggcatggcagtggctgagtctgtaaaactggacctcatggagaaatccacagaatctctggctcagggaagacctggagatcccttcaccagctgggctcctgccactggacctctgcccaggacgtggagacagccaggaaagtggtgggacactggaacccccctcccgcaggcagcagccaggatttgctcaggtgtggtcgggcatggtgccccggcgcgccagccagaagatccagctctctccttaagggatagctggctctgatggtgaccatggcttttggcagagcctcaggacgaaaatgtccacccacatggtactggagcagaaagagcccctgattcctcggtggccaggtagggactggggaaggaggctccagcttctaaatagattccccccaaagggaatctccttgtcctcctgcgactttcccccaaagcagaccaaatgaggtatgacacagaatattctgctctggccaaaggttcacctcaccagagcttgcttcttaggtgagcccagcccaggcatgggcctccttggtaggcagagggggcgttccagagcatggccattgatgcactggtctctctgtgtcttcctgaggtcatcagtaagttaacgctggacaattaccctctacctgggcgctgcttagggctttgggggagaccagggcgagcaagatatgcttagctcaccccagaactccagagccagctgagaaggccaagatcacaaagcaaatgcccaggttagggaacttcctgtagcaagaggagaagaagcacgttccattcctaggcctggtgtgtgcaaaggtgtgggtgtgaatcatattccaagcatagagaatccacagtggccagaactggggcatggctgatggggtgtggagagagagtggatcgagctttctgaagggtcctttccctgtgacttaatgacatggtggggtgcaggaggaggtggcctgtgagagtcctggctgctccacagggcaggtatgggcacacctgggcagggtgcctttccagaccttgtagatcacatcaggaggcaggcgtgatgcagagaagagagcctcagctgcgagccagtgggaccacatgtttgctgcgtccccattttctgcatgggtaggggatggaggggctccagcactgagccatgccctaagctgcctttccctagagcctaccccaagatccctccagcctggatgtccacagccagcagcccataagcagttccctgggagccatgtggcagatccgctaatactgtcctctcctctgtttgcttttcaggaataaagttcaacatcaggccaaggcagccccaccacgtaagttctgagagtcagataaatctcagtgcacacagcccttgggaaactggggagggctgggaagaaaattaggagctcacattggatccattcttggaaagaaaaatgtgtccagcctttcccaggagccttgggaacaaagcccagggctctggacccatgaattttcccttccttgttagaaggcttctttgcacggtgctaatagaggccgtaaatctgagcccgcctgcaggccacctattcccgccaccctctcccaggccaggttcctgggaggaccgcgccatcttgtggccgaaatgacacttacacctcagcgggagggaggcctttgggtgccgggccagggctcagaccggaggggtctcacctacagagtcagcctgtctccctcacctgagagggacaggaaccccagccgtggtgagagcctgacctgtgtggccctcagtgcccagctgtcctttccactcagataaccacttctcttcttgccccaggacctcccaccaggcggctcccaggatggtgacttgaaggaacccacagagagggtcactcgggacttatccagtggggccccgaggggccgcaacctgccagcgcctgaccagcctcaacccccgctgcagaggggaacccgtctgcggctccgccagcgccgtcgccgtctgctcatcaagaaaatgccagctgcggcgaccatcccggccaacagctcggacgcgcccttcatccggccgggacccgggacgctggatggccgctgggtcagcctgcaccggagccagcaggagcgcaagcgggtgatgcaggaggcctgcgccaagtaccgggcgagcagcagccgccgggccgtcacgccccgccacgtgtcccgtatcttcgtggaggaccgccaccgcgtgctctactgcgaggtgcccaaggccggctgctccaattggaagcgggtgctcatggtgctggccggcctggcctcgtccactgccgacatccagcacaacaccgtccactatggcagcgctctcaagcgcctggacaccttcgaccgccagggtatcttgcaccgtctcagcacctacaccaagatgctctttgtccgcgagcccttcgagaggctggtgtccgccttccgcgacaagtttgagcaccccaacagctactatcacccggtcttcggcaaggccatcctggcccggtaccgcgccaatgcctctcgggaggccctgcggaccggctctggggtgcgttttcccgagttcgtccagtacctgctggacgtgcaccggcccgtggggatggacattcactgggaccatgtcagccggctctgcagcccctgcctcatcgactacgatttcgtaggcaagttcgagagcatggaggacgatgccaacttcttcctgagcctcatccgcgcgccgcggaacctgaccttcccccggttcaaggaccggcactcgcaggaggcgcggaccacagcgaggatcgcccaccagtacttcgcccaactctcggccctgcaaaggcagcgcacctacgacttctactacatggattacctgatgttcaactattccaagccctttgcagatctgtactgaggggcgccgcagctggccggggccgccctgccccggtcactcacctgtgctcccgggcatcctcctgtccctggctcctcatcctgggagcaacagggctctgaggacgtgaggagccatcgctgtgggaggcagcaggccccgggtggggggcagaggcgcccagccttggatggggaccccagcccctggcctgtacctgtttcctcattccttggctgagggagaggctgagaactgggcagacacccctggagctcagccgacagttttgatgagcagggaagtctgaggcccagaggacggggggcccagcggtaagggatgtcccgcactcccttagccattgccttggaccaaaccacgtggtttgcagcttttctacgagccaggggggaggttcccttggattaaggttccaaataaagcacatggtttccagagcagcggtgtgtactctgtggtggcgtgggagcacgtggaccctgggctgggctttctggggctctttctgccttcccggggcagcttgagccaggtgctgcaggccccactgcagagaagtccagttcaggagcagcttcctgggagaagagcacagaggacccagcggctctcagccaggacctgcaggcgtctgaggctaggtcccagtcaactggggtgcttccgtctcagtcctggcacattaatcctgaaaggaaaagataggcctgttcctatgggggcctcctggggtgtcttcttatcagtgcaccttgcaggggcctctggggactgccagagcagtagccagctctccaggcaagctgccaatcagggctgaggccggagccagggggcacggggcatgcatctcggtgggtgtggtactcccagcaggaagcaaggctgtccctggctttctgcacctctgagccaagcaggactctggcctgaggctgtcatctgcagacactcaccctgatccctggccccactcaccctgatccctggccccactcacctgacaaaaccacctcagggctgtcaggatgcacatgctctggaggaggagaggagaagccatagaggaaacttctccaaaagcatacatgttcacaccagagagggctccagaagtgtcagcagtcaatgtggttctgggaaggtctgggaggaggtgtttgttggagtgttgagtgtgggcatgagtgtggctgcatttgggttttgtttgtgatgggaagggctgcctgactctggagtctctgccctctgtcagcctgtctgcaggagcctctgcatgccctcctgggtcattctgtgggttgctctgtgggccctcccaggaggctgccctctgtctgtccctatttgctaggggagatgctgctgattctccacgtggaggtgccactggatccctgggtggacccccaggtggaggccctgctgattcccaggtggagaaactgccggatccccaggtggaggaactgctggatccccagatagaggaactgctggatctccaggtagaggaactgctggatccccagatggaggaaatgctggatccccaagtggaggaattgctgatccccaggtggaggagctgctggatcctcagttggaggcgctcctgtattactagttggaggtgcttctggaatctccccaggctcacaccagcctgagctgctccatctccttttctgcctccatcttggaccctggaacattgcaaaggggaacaaggcactgagccttcctcctgcccctttggggtaacatccatccaggagatctgagaagcagggagacctccctcgggttccagctggaagcggcttggaccatccaacagaagtgacccagaggggcagggaagaggctgtggtcagggcctggggaactcttgggacccgtggaagctgagacagcagatgctgaggggcccagaaagccagagtagctgccctgcaccttggccaggaccagggtccatgtgagaggagacagggaagtgcctggctgaggacaacctaaaaagaggtgccctgggtcccggtgctcaaacgtgagaccacgttcatgtgcaggaaagtgtccctggtcatgggtgcatttggtgaagccagaggcagtgcccctatggcatctgctcagcagggaacacctgaactctccgctgacacagcatctgggagcagcttggagacagtgaggatgacacagcccctcccctgggtgagcgtgtgtgtgcgtctgcatgtgtgtgtcgggggagaaggcacatgcacttgtatcatctctcagagaaacgccggctcaagctggacagacgtggacacacaacgcatccatcagtggggggcttttgttgcaggtggtgatgacagaagacaggtgcaggcagtgaccatgatcaccacttgacagccctgagagtgacctccaactgaaggccagaggcccagcctggagaccaacccagctccaacccccaaccccagccccaaacctcacagggctcaggaagagccgactcagtgcagtggtagggaagtatgtgtgtgtgcacgtgtgcatgtgtctgtgtgtgtgtctgggtgtctgtgtgggtgtctggcctgtgctgtggggtgggtggatgtgagcgcgtatatgtctatgtgtgtgtctggcctatactctccacatgtgtgtttgtgagtgtgtgtgtttggcctgtactgtgggtgggtgtgagcatatggatcatgtgggtgggtgtgtttgtgtggatgtctggcctgtgctgtgggataaacgggtgtgagcatgtgggtgtgtgtgtctggcctgtgatgtggggtgggtgggtatgagcgtgtgtgtgtgtgtctgtgtctatgtctgtgtgtgtgtgtgtgtttctgccctgtgctgtagggtgggtgggtgtgaacgtgtgtgtgtgtctctggcctgtgctgtggggtgggtgtgagcatgtgtgtgtttgtgtctgtgtgtgtctctgtgtgtatgtctggcctgtgctgtggggtgggtgggtgtaagtgtatgtctgtatgtgtgtttctgtgtgtgtctggcctgtacagtgtgagtgtatgtttggcctgtatcatgtggatgggagtgagcatacaggtaatgtgggtctgtgtgtctgcgtgggtgtgtgtctgtgtgggtgtctggcctgtgctgtgggctaaatgggtaatgagtatgtgggtgtgtgtggggggagggaggtatctggcctgtgctgtggggtgggtgtgagcgtgtgtgtgtgtgtgtgtttctagcctgtgctatggggtcagtgggagcgtgtgtgtctgtgtgtgtgtgttcctggagtgaggggtgtgcattgtgtgtgagcccgcgtccatgccgggtgtgggctgtgtgcagtctgagtcctgcccgtctccaggaccatctcgtgcacctgctcctcgtctctccctgcccattcgctggccattttgtggatgtcacctggaaggggccaactgatcagagaccctagaaagggccactggcagctcccaggggcaaaggaggcccattgagttgggagaagaacagcccaagccccagggccctccccagcttggtccccctgtgggcccctccgggcggccccagggaagtccctgccaggcctctgcccttgagtggctgagacctcctggatgggagccccactctctgagtggtgacgagaacagacgtcccaaagcctagggtccctcctggggcttgggagccccaaaggccttgagtatcctggggagataggattcaaggtccacacagatggtcaggtgggaaactcgggcagttctggctccccccagctccccctcctccctgctgtctcgacagggtttggtggcccatacagggcctgtccaaggggcccaggacaaagtcaggcaggcagtggacagggggtcccccatcatctccccctactctcaggcagggtttgccaatttcatcctcagggctgagccccttggtgggggacaggagcctgtggagcccatggttctgaggcctggaggcggcctcacctcactgcccctatctcttcttggccccttcctcttcagggagcactcgtggtgaacccagcgaacatcctgctggcgtccctcactcctccactgctctacaagcccaggggacccagagctgggcacaagaggctgtgttgaaccacgggatccagaaatgggcaaaggtgaaagttgggggtggggtagtctgggctcaagtaacactgcccctacctccggggactcccagctgatgggtaccatgactcctgaatgaggaataggcaggcgccccggggagcagggtgtggggagaggactgtatgttagccccactgccctgcccgggccggggagggggtgtgggagccctgagctgggttcttcacactgccctggcctggctgcttgttggcccttctcactgcccagggcacgctttgcacaagaggctctgttgggagatggcagcagagggggacccggggtctgggccaggccggggctactaggggactatcctcctgcctctccttcaccctgggccggcctcaggaaaggaggagcaggggagcagctggaggtgccaagagctctggaagctagggaagggggcagggggcaggggcagagggcagagagagcaacttcctgtcacgggcctgggcgacccttccgcgccacctgggtatgccagcctgagtcaagtggacagtgagtgctgagcgtggagaagtgcaggtgcgtgcgcgaggtgtttaaagaggagaccaagggactgggaccctgagtgtgtcgggggtgcaggtgtcgggggtcactcgtgctgggtgctgcgctgtggcctcgtgtgcgttgcccagtgcccctctcccagcggtgctgtccactcatgcctcgctctactgtataggtgagaagactgaggcacagaaaggcgtggccagagctgtgcagcgcaggagttggagctgggattgcgcccaagcggccggcaggggctccctcgcgttcgtacccacaggcgcagagccgttctccgccgccaggtggggctaagtccccgctcccgagcagcggcttggggatccccggcggggccgccaggtggcagcagcgctctggccgcgcggctccagctcccgggcgccccgcgtccccagcctccccaccgcgcagtcggctcctctgtcacctcgccctcccaaccatggggtcacggggctcccgcccctccactgtctgcgggcggcctccagaggttactctcaaacccaccagctccaggggacccgcctgtgctaacactaagcccccaaacacccgcagcgcccctaaagcagtgacatccacaacctccccgggggcttgtcctgcacgctccatcagggtgatgtcaggccttctccaacctcaaccacaacacgaacgcacacgcgcaaacacaaatgcatgcacacacacaggcacagacgcacagacacacacaaccacacacacagacacacagacacccatcctcacaaacacacacccagacagatatgcagacacacgcatgcacacagacccagatgcacgcggacacacagacacacacgtaaacacacagaaacatgcacggctcaggacggggcttcttgctgcattgaaataaatgggaagaaccggaaggtccctcactgtctcagccaagtgcatgcacttcccacgctgagccctgtcctccacttcccctcctgcactggccagaggtcacccccgacacacacacacacacacacacacacacacacacacacaccagatcccagtcccttagcctactccttaagcacctcccgcgcgcacctgcgccctctctgcacacacagcaggctttcccatcagcagaaaacaagctgtcaatgccccacctttaaaaacggggaagccgtagccagatggcccctgcagcgcctgcccatttctctcctctccttcctggcagaacccacccctcagcccccatggcttcacctccttttccactctggaccccaccctggcctgccttccaatcttgccacccgcagagtccgctgacaaggcaccttccactgccgcacgctggcaatcccaggcactcttctgcctacacactccctgggcgagctccccatcacccctgtgctagactcccggatttgcccctgcagccctgatcggtagacccccatggccagccgcctcacccccagctgtcggcacgtccagcgggtgtctccacttgaacgtctcacctgagccgcacacctttcacacctcaagcccctcctctcccggcttcccggctcagccttccctacaagccctggatcgtccctttcgccctgcctcccaagggcatactgaatccatgtccattctccctctccagggctgtcatttaacccaagccattatcacactagcatctcctgccttggcacctaaagtaataagtaactatggaatttaccggtttaccaggtactgctctaagtatttcatattttttgtaccctgcccctcgcgatcccggctgactgcaaactccgcctcctaggttcaagaaattttcctgcctcagccccccgagtagctgggatcacaggggcctgccaccacaccgggctaatttttgtatttttaatagagacggagtttcaccatgttggacaggctggtctcaaactcccgacctcaagtgattcactcgcctcggcctcccagagtgctgggattacaggcttaagccacctcgcctggctagcgtttcacatataagagcttatctaatcctcactacaaccctggaagaccgttatcatcctccccattttttgcagatgaagacattgagacacagagaggttaagtaatctgcccaaggccacacagctataatggggatcttccagaattcagagcctgatggtttggccctggctctgtgtgcccatgagtgcacagttcttactggctctctggtgttccaatggggtaggaggttttgcgacagcagagaaggaattgaatggtcactagggcaagggaaagacaagctctctggagaaagagagggagtgtctcaggcattgctttgcacccatttgcagtttatgatggatgtgcagggcaccagcatgccttcctgctgcagcataagcaaggtcacagcggggctcctcctagacctgtgtgacagaggagtgaaggacacagagaatagtcacccaatcaggacaaggctggatgaggaagggcatcaagacaggaagggctgataggcagagagaaggcgctggggtctgcggaggaagtgaggcgggagttggggacctgtgaccttggagatggtgtggtttcctgtggtgacaggcaaactgtggccaggggtggcagtggccaggatcacgatgatgactttcacctctgcccaccatgataatctcctggatggagatgacctcggttccagggcttgtgaacaagtcacgccccacagagggaccctcttcagcctcctctggggtctggtgacacggtggtcctgtacctgtgcctctggctccatcagttcacacttgctacctgcctgcttacctgcctgctgtcacctgttccagcctgtatccacctgcctgtgactacctgagtttgcctgtgaccacccacacccatctgtctctctctgccttggtgggtggtggttttggggctacaggtcagccccctcctccgcgtgcagggcctgagagcaggggcgtgggagacggagtctgccaatctggccgcaccagctggagatgagcccaggactgctgacgcctccagcctgcctctggggagaccatgctgtgtggatgacagtcccctaagacccggaagcgagccacgtctgggaggatgagatggggtcggcaaatctgggccgggagggaaggctgcattcttgctctccaaaccgatgtgctgaattttacttttccttttagttatttcttcttcttaaatcctgtttctctccctgaggcagctaatctattatttaacatcggattgtgggattgaaactccaaggcaaattgaaaattatttgtgtttgaggtttcaggcgtgaagctgaggcaaccatttctgagagatcctgagaacccgggcaaaggtagcgaacccacagcactgttcctggaaggggctgagaggactggggtgcaggaagcgttccacagacctggcaggctggggggccccgctatgctccagccttgcccacccaaagcccgcagctcgggggtcattaatctccatgtggcatttcacttgggaaatgctgtcaacacctcccactggccaaagtcctcaagaggctgggcaggtgccatcagtcaccctgggcctgtgcccaccctgggggaaatgcctcggtcatgagaggattaatgacacgaggagaagggctcgtcatcatttttcaaggttcggctctctgtagatctgcaggcaggattgctggcctaacagtcagtggagagtgacccaaggctctggagagtgaccaaggaacacggctgagggtggggggccctggcctggacccccgctgagtgcccgaagactgatggagcatgcgacctcctagcgctggctctcaggacatgaatcgggaccagaaggaggagtgggcttgagcccaggggagtgtgaacaaacactgtgtgagccccacatagacatctgcggatcacggaatgggggaactgggagacgccaggtcagggagatccttggattttggataagggataaggagattggattttgtgttggaaacagcggaaccattgaaggaggggtgtactacggtcaagttccatgcccagaaggatccagaatgaggctgaggggctgtcttcatccatcttagtctgtctgggctgctacatcaaaaatcccatagactgggtgactcagacaacaaacaatttctcacagttctggaggctgagatcaaggcgccagcagatgcagtgtctggggagggccggtttcctggttcatagggggccctcttcctgctgtgaactcatggcagaaggggtgaggagctccccagggcctcgtttatcagggtgctaatcccattcacgagggctccacccttaggacctaatcaccaccaaaaggccccacctcctcacaccatcactttggggttgaggatttcaacataggacacaatattgtcaggggacattcggcgcatagaagaggctatcagcacatctccatccaacacttagagcggtcacacgtgtcaggccttgtgctagacctgggtgatggcacccttatgcccccagctcagaacagagctgagcatcgaggatctgggaccacagagaagtgggaggagtctcccacaaggtcctctgccacccagatttataaaggaaagaggtttaatcgactcacagttccacatggctggggatgcttcaggaaacttacgatcatggcagaaagggaagcaaacacgtctttcttcacatggcagcaggagagagaagtgccgagcaaaggaggaaaagcgtcttataaaaccatcagatcttgtggaactcactcactattacaagaacagcacgggggtaaccgcccccacgattcaattacctcccagtggatccctcccatgacacgtggggcttatgggaactacaattcaagataagatttgggtggagacacagccaaaccatatcaccgtgggatctcaatgaaactgcagccatagctgcccatcatgaactgggtcctgtcagaaccaccaagtcaaaaggccaagtggactcagcacctcctatcaaaagatagaagttggccagatgcagtggtcacacctgtaatcccagcactttgggaggcagaggcaagaggatcgcttaaggccaagagtttgagaccagcctgagcaacatagagagaccacgtttctacaaacaaaaagtaaaaaatcatccaggtttggtgatgcacacctgcagtcccagctactcaggaggctgaggcaggagaattgcttgagcccaggagttggaggctgcaatgagctgtgattgcaccactgcgctctagcctgggtgacagagtaagaccttgtctctaactagtaataataagatagaagtggcacacccaggatcaagtgcaagcagggtgggaggacacaagcgagctgtgtgagcagggagcctgggcaccttgggatccccactgctgcactgagacctcttcctcagtttacctctgaggccatatggtgaggggcatgatcagctaatgaaagaggaaaaggctagagcttttttcacagatgtgttggcttgtgtagaagcaggtaaaaagtggatggtggccaggcatggtggcacatacctgtaatcccagctactccacaggctgaggtacaagaatcacttgaacccgggaggtggaggttgcagtgagccaagatcgtgccactgcactccagcttgggcaacagagtgagactccatctcaaaaaaaaaaaaaaaaaaaaaaaaagtggatggtgaccagggtacagtggtcacatctgtaatcccagcacttcaggaggccaaggcaggaggattgcttgaggctaggagttagacaggcctgggcaacacagcaagacccccatatctttttttttttttaaataaaaattcaaaataaaagctgatggtgtctgcactgcagcagtggatggtgtgtgcaccacagctccacccaggagtggcctggaaagatggtggtaaagtgaaatactcccagtgggtagagctttagacaccggtcatccactttggtgaaaagggaaatggcctgagttcagaatatacatggactcatgggcagtggccgatggcttggccagatagtcaggagcctagaaggagaaagattagaagttaggagacaaggggaagtcatgtggatgggacttggcacaaagtgtgacgatgtctctcacattagcactcattggaagaggcaccaagcaaccaagtgggcagaactacttgggtatgcaacatcagccagcttctgtcattggcttcttcacggctggtacaaaaagcacacacaaggaggacgtggtgacagggatggaggttatgcatgggtccagcaacaggggctcccactcaccatggttgatctagctgctgctattgctgctgccaaatctccaattctccagtaacagagacccacactaagtcccaaatgcagcatcattccatgaggacaccaacctatcacttggtggcaagcccaccacactggatccctttcatcctggaaggagcagtgattcattttgtcaggaataaacacaaagtctgaggatgggtttgcctttcctgcccacagggcccgagccagaccacaagcccaagggcttacagagtgtctgatgcacagcgcagcatcccacgtgccattgcatcagataaagggactcactttacagaaaggaggtgcaagggtgggctggtcatatcatctaccgtatccctccgaatctgctaatctgataagcaatggaagggcctgttgaaatcacagctttttgcaaagatgaggtgccattctccagatgaaagtaggtaccttaaatgaacaaaaggtggacatgggtctacctgggtgtggtaggcagaatcatcacccttttcccccaaagcgatctgcatcctgactcccaggacccgtggttatgtaaccttacatggcaaagaggaccatctagacaggatgtgattaagtgaaggatcttgacgtggggaaattatcctggattacctgggggtgaggggcggctaatgtaatcacaagggttctcctagctgcaagaggaaggcaggagagtcactgtgggagtgatgcagtgtgaaacggattcaaccagcctttgctggctttgaagacagtgggagccatgagccaagggagcaacaggccccttgaagctgagaaagacaaggaaatcattcctccctggagcctctagagggaatgcagccctacctacaccttaatttccaccctgggagactcatgttggactccaacttcctgagctgtaaagtaatagatttgtgttgttctaactcaccagatctgtggtgtgttctcacagcagcaacaggaaaccaacaccctatgtcctaggtaagatgggtctgggaaccaaagagcggatgcaagaggtcctgcttaccctcatgctcatctgcccacttggagaacatgtgcttcttgttcccacagacctgggctctgaggatttggaaatcctgcttcccacatgagctatgcgtctatcaatgaacacggcaagagtcctgtggaactgtaagctgtggctgctgcctggacactttagactgcttgggctaagacaccagcaagcaagatgagttaccctcttggcaacttagctaagtgacatcagccagcttctgtcattggcctcttcatggctggtacaaaaaacacacacgaggaggacgtggtgacagggatggaggctatgtataggtccaacagcatgggttcccactcagcatggctgacctagctgctgttgctcctgccagatctccgattctccagcagcagagatcgatgctaagtctggaatgcaccaccattccatgaggacacccacccttcacttggtggcaagccgaccatactggatcgctttcatcctggaagaagtagtgactcattttgtcaggaataaatacatattctgagtataggtttgcatttcctgccacaggacctgagccagaccacaagccctgatcatcagtaagagggagcatttttattatacagtggggctgggagaaatctatttggtgtctggttaatccacttggatgcttttcgatactcccttgcccagttttgacagcgaatgggcaagtgcagcaactctggtctgagaaggtgatgttggccagagtctcagacccctcagggatgaagatctggtttttccaccaggtaagcccctgagaccaggttgctgttcgctgagggtgcaggagtcctgaagagataataaggaggagagaagctgagtatctgttgcagctccaagaccaactgtgacagtggaggctgtaatctttttttttttttttttttttttgagacagagtcttgctctgttgcccaggctggagtgcagtggtacaatttcagctcagtgaaacctctgcctcctgggttcaagcaattctcctgcctcagctgggattacaggcatgtgccaccatgcctggctaatttttgcatttttagtagagatgttgtccaggctggtctcgaattcctgacctcaagtgatccacccaccttggcctcccaaagtgctgggattacaggtgtgagccactgtgcccagacagctgtataatctaatcttcttctaagatcccccagggagaggcataccagaatcctggaggagctgggtcccttttctctccctgcctctctagagagggttcagcctggtcaggtggacagccggctggaattggggctggttggctgggactttgtggtcacttaggtccagaaaagcagatcatggggacaggcaccagggttttaaggacatcgttaaatacctcacaagacagaccctggctgcatgtcttctaacccacgatggcctcagcttaacgagtcctaagaaagaactagccctccttaagtcattcctagagttcttcaatagcagccaaactatacacatgaaccaacccctccaaacagcatggctatgcagcaggtcagaagagaaaggcatgttggacttaccactgggctttggggggagctgcttcacctccctgggcctcggtttccccatgtatggaaagggccagtgatatggtctggatctgtgaccccaccacatctcatgttgaattgtaatccccagtgttggaggggaggcctggtgggaggtaattggatcacaggggtgatttatcatgaatggtttagcatcatctcttagtgctgttctcatgatagtgagcgagttctcccgagatctggttgtttaaaagtgcgtagcacctttccccctcactctcttgctcctactccagccatgtgatgtgcctgcttccccttcaccttccgccatgattgtaagtttcctgaggcctccccagccatgcttcctgtacagcctgcagcactgtacagtgagccaagatctctccacctcttttctgtataaattacccagtctcaggtatttctttatagcaatgcaagaatggactaatacagccagctcttcccaagccagcacattccagcaccccactccaaggaatccaagaattccagaccgaacccgggcttccaggtcattatgaaggtatattcatcaaggtgggagaatataatgtatgttattaaatagttgctagcttgatttacaccttttaggtatttagacatatgatacgtggatctctatttatcctcttcttctcagccctgaaaatgttaggggtgggccaagatatgtaatacacacacatgcataattttatataatatctatagtatatataacatatgattatatatattatataattataaataatagagtaacatgtatatcatcccagtctaattcgtgtatggatgtgtatacatacacacacacacacacacacacatacagatatatagtttatagtcagctattgccgtgtgacaaagacacacacaatttcagcggcatacagtgataagcacgaatttctcctgtgtctgtgggaggcttatgcaaccccactctgtgtatgtcactcgatggctccagtctccagctgcctggagcttattcttatggccacagcagaaactccaagtccagccacagaagcacactttaagcctctccgtaaagccactacctgctaactcccacttggtgaagccccgtatcagggtgtggagaagttatttctgccaaccacgaagctgtagcaagggtgtagttgtctctaggtactacagggcagggaaaaattggaatcaataatttaacccatcacacataccaaacagaggttccctaggaagaagaaaatgagattgtcagggtgtgggggattaatttgtaattagttctaattactaaaagaatcgatgttttaattttttacaaagtatctgtattcccatattctttctgtaataaagcaaaaatcagaagccctcaattctccccaattccagttaaaatcctaataaatacaattgttacgagttgattcctttggaagactgcctagccattttgaaaaataaattcttttttagatacagacctcaaaccataggcagaagttaattccaaaaggatgagagacctagatgtaaaaacagaactgtaaaaattcagagggcgataatattatgaaatatatcaagacgtttttcttttttgcacttccttgggtgaccttctagcttttcagccagaggctcgcattgcctagaggtggtggcagatggagggagggagacgaggatgagggagggagggaggagggaagggggaggaggagaagaagaagagagagaagacagggaagagaggagggagagaagggtgacagggagctggttgagggaggggacacagagcaggagacagaggccccatgtggatcaaaggagtgacaagggagggcccatgctcagtgatatgagaacagcaagaggcaacaaacaagatacaaaaggatacacacttccatcccattcatgtacaagtttaaaacctacacaagtgttaccattgtttatgaacatatcccaatgttgcaaaaagtataaaagggtgcacaggagggatacaactggctggggaggaagggaggggtttaatacatctgtatcatttcgtattgttttttaaagaggatctgaagcaaatattcaaaatggtttgttacatttgggtgtctgttacattattttttacgttgtgaaatgcatgcatgatggaggaaaggcaggctgtgaatcagtatgaataggttgatcccatactttaaaagcacatgtgtgagtgcctgtgtgcacatctgtgtgctcaggtgtgtgtgtaggtgtctttttacctatggttctgtgcatgtctgtgtctgtagattatgtgtgtgggtgtggtatgggtacgtgtgtgtctctttgtgtcgcttgtgtgtgcatgtgtctgcgtatctgtgcaactatatgtccgtgtctctgcatatttgttagtatgtgtgtccatgtctgtgtctgtgcaattgtgtctatagttatgtttctgtatgtttgtcattgactgtgtgtatttgcacgtgtgtgtgtgtgtaagtgtgttttgttttgttttgttttgttttttgagatgtagtctcactctgtcacccaggctggagtgcagtggagagatcttggctcactgcaacgtccacctcctgggttcaagcaattctcctgactcagcctccccagtagccaggattacaggtgtccgccaccatatccagctagtttttgtatctttagtagagacggggtttcattatgttggccaggctggtctcgaactcctgacctcaagttatctgccctcatcggccttccaaagtgctgggatcacaggtatcagccaccacaccgagccactgcatgtgtgtatctgtgtgggtctgtgtagttgtgtgtctgtgtgtgcctgcacacctgtgtgtttataaatagaaaaaaaactagatggacaaatgtcaaatcattgacacagttctttctgggaaggggagacagaggacttttgtttccctttcacacattttatggtgatacattattttttgatgatgatgatgatgtattctttatttatatttttaaatactttttaaaaagacagtacacggaggccgggcacagtggctcacacctgaaatcccagcactttgagaggctgaggcaggtgggtcacttgggctcaggagtttgagaccagcctggccaacatggtgaaaccccatctctactaaaaatacaaaaattagccaggtgtcatggcgcagacctgtaatcccagctactcaggaggctgaggcaggagaaacgcttgaacccgggaagtagaggttgcactgagctgagattgcaccactgccctccagcctgggggggagagtgagactctgtctcaaaaaataaaaataaaataaaagacagtacagagtttcacagcttgaaaaataagaatttaccagccgactctgcactctgctccagggctcctcccttgagccgcactttgctttgcctccggggcctggatcatccatcccacccatccacaagggccctggggacagaggagcctggggacacttcccggcccaaccccaggggcacagcccaaagcaatcatgacatttctctggagtcttgtattttatctttaaatgttaggcagagtttacgttctcccttgtaatgtatacatgtttgtcttgctgacttgtttgtcaattctggagtcaagggggcactcaaatggactccactgggcacttgtctgtaaacccagcactttgggaggagaaggcaggaggattgcttgaggtcaggtgtttgaaaccagcttgggcaacatagcaagaccccatctctctactaaagatttttttttttaagatggagatttgctcttgttgcccaggctgaagtgcaatggcacaatcttggctcactgcagcctctgtctcccaggttcaagcaattctcctgcctcagcctcccgagtagctgggattacaggcacatgccaccatgcccagctaactttttgtatttttagtagagacggggtttcaccacgttggccaggctggtctcaaacttttggtctcaggtgatccgcctgccttggcctcccaatatgctgggattataggcatgagacattgtgcctggtctactaaagatttttaaattggcccctgatgtagtggtgcacgcttattgtcccagctacttaggtggctgaagtgggaggattgcttcagcccaggagtttgaggctgcagggagctatcatcatgctgctgcactccaacctgggcaatggagtcagcctcatcctcttaaacaaacaaaaaaagtgaaaggggactctgctgtacgcgccttcctgtgctcctgtgcatctcttgtgggtgggctctgggcaacggtacctgaggggtggagctgaaaccatggcttgacgggaggcatgttggaagaggaaatcagccatcagctctaaacaacagctgctacttacagagcactcacactggctgggccgagttctttgctttgctgtgttctcccatttaattcttccagcaaccccacccgttaggtcctatctctgttcccacactacacaggaggacactgagactggagaggtaaagcccaaggtcaaccagctgcactcagattctcaagttgatgctctgcacagactgtctactacagggcaggcccaaggagaagggattgcctgtcacatggaaggggctccatgtactgggcttgggtccaaggaaggagagccctgggtttctgatggaacaaaggccactctcattgtctaaacttttttcatgggaaaaactcccttggacccttgcaaatgtatctgcagagcctcaggtggtcacttggagccagagtggcagccacacacagtcacttggggcaggattctatggaaagccattctcccacggatcccgtctgggcttatattgattgagaaaagtggaggactcccccgacccccctggagagggcctccctggcatcccttgactgcaacagcctaatctgttccaacaatcttctcagcgctgttgcacaagaagggctacgggtccctgggagtgctcttgaactttccccagtgtcaggccagctcagggttccgtgcttaaaacattcagcggcccagccctcaacacagaatccatcctctcctccccaacccccacccccccgccccactcccacccccagggaaagtctgactttgcccagtacccacttccctcccaggggttcagggcagcagtcccattggcttgtaacttggcatgtgacccagtttttgccaataggacgtgacaaggagggctgtgggagccactaggataattccattgttttctataggtgtccaggcaggtgtgaagctttgagctctgttcattttgagaccagagaagtgctggcatgagaacaggccaacgtgctgaggatggtagaggaaagctggggagagctggtccttgaatagtattccaatccactgattcacctccaggcgcattctgtgaatcaggtgttctatcatgaagctattctgttgcagcctttgctacttgcacccaaatccatatagcatttgagaatttgatggaaaaggctcaaatgcagttttgagcaatttagggggctgctggctcccccacaggctgcaaaaatgttaaaattcctggtcaggaggtcttagtcttgtctcgttctcaccccagtgctggctcccagggccggcagggttggtttggttcagaatggcacacccaggctgttggcagaaggtagaaaggcaacccctgccttcctgcccactaggagtcctgagtgcccactgagcgtggtgccagggactgggcaagggcaatttgggtgaggggacaggtgaggggactaacagtcccatgtttcgtcactccctttagtctccagattctctggggtcctaactaggagggaagattggggggattcccagggtagaggcggaggccaggtgggtgtgaccgtgagctctggtccaggctggcttattcctagcctgtacaggagccatctctggagcctgaggtgagcacagatctaagaaggactgaccagcaccccaggaagcctgggggtgggggaagagacaacccggtgctaaaaccccagtcctccctcccggagacagcagcaggcaggtctctcagtctgttcatctgcttgtctgattatagccttgctgagaaggttgggttcagcagagtctgtgatctcattttgggttcattttcccttccttattaagatcctaatttttaaacatagcctgcaaacagcaatagcaacaaagaacaacatcacattggaagccaccttgaaacatctggaaacctgaggtcttgccatgggttttacatcctgcaaatgccccgctgtgtgagagcacaggtttgaatctgctttttaaactatgaactgtaatgacttaagtgccagtcaactcttaatgatagagcaagttctgattggactcacgtccgatgtcatctcttgaaccacagtaatgaaacaggatgtactccacgagatgtttcaatatgttctcagtccaaattctacatctttcaattaaaaaatgcatcaccattgcattatataccacagatcattaaatacctatcactgtccatatccaagtctcccagtggaagagatggctgacatttagctaggaacttttaaaacacttgagaataaattatgacccaaacttactgttcttaatgacacgtataaagttcagctcttaaataaaaggattcaggaatacagaaacaaagtccccagccgtactaaggaaataaaagtcgtccagttcttgtttccactaaattgtacatttttattataattggtataaagtgaaactcttaaaaaaacacgtaggaatttaaaataaagtagaatatcctattttcagggtcaccagtaccatggtgagatttgtctcttaaacaatgacacttagtagctctgtagttccatgaatacttttgaagtgtcatattaaaaccaatctcatggccttgaggcaaagagaagcaattagtcttggagttgtgaataaataaaaatccatttatacacccgtccttgacatgtaccttgcaaatcttagaaacttcatctagtgggaaaataaatgttaaatcatgaatacccatactaatcacattgccatgtggcttcctaaaacagtttcgcttataccaatctttcaagtattaatttatatgtatatattcacccagattgaacacgaaacaaaggcgttaccgcagccacctaggatgagggacaaaagaggtgtgaggggcgctgggggccacaggagccatgacaagcggattttcagtgagtccctcatcctccaacacaagcctgctccaccttccctcattccaccctccacaaaggcctggggcgggggaggacgtttctgtccatgaagttgggggcacccacacacacaacctcgtccgattgtgattctagccagcatttaagggtggatacaggagatcaaagtatttgaatacttgcttcactttctatttgtgtctggtccctcaatgctgagtgggatgtgcattgatggagggctttgctgttcctatgtcgtgcttgggacagtcggccacaaagctgggctgacctctcgggccgggccgggcctggccagcgtgccgaacgcgcagagagcgcgctgctgagccgaagctgggagctggaagcccggaggtaccggggcgtagggagcagagtgggcagcccttgggcctcgcgggagcccctcccaacccctgcacagatccctgacctacttccagggcttctttctgttccaggagcagctcaaaatccataaattaaggaaattaactgatggggcctgcggcatctttgtaagctatttaaatctataaatttacaacatcttctgcatatatcaaataattgaactaactgcagggatgtaactttaatgagaaaatttccccctttttcctgtagttcgaactcgaaaataaataaataaataaaaccttcccttaggaggaaagtttcggctgattcccgcgtaaagaagttacggaagcgctgtctggacgctctctccacgcgcgcgaggtcctctagtagagggagaaagccccccccacttcaccttcctcccactggcaccccgagtccccctcaccccagctccaggccgaccccgagcgccccccaccccgggagtgcggccgctagggggcgtccaggcccggccggagccggcggtcgggacccaggcgccgttccggcccgtgcgcacccgccccgcggtcccagccggtctccggcccgggcgtccctggagccaggcgggggcgcagtgccggccagtcgcgcgctccgtttcctaggagccgggaaatggtcgccgaggaggaggaggaggcacgggcggggcgcaaaggaaacaggaggaagaggaaggggaggaggagtgggagtgggagaaaaggaggaaggggcggccgaagcggagactggggaggggcgtccggggcgcggacctcggccgcggggagtcttggctgccgccgtctccatcgcgccgcgcgcgtaaaggaaatggcgcgtctagccgcgagcggtcggcccggtgccccagcgcgtccctcccccgcggcggccgaccgcgtgtccgcagacgtcacgggagaggggcagcggggcagagaccctgggagggcggccagggagcgggggaggggcggcctggcccccggctccgctccagccccgaccgactggcagcccagtttcttcccaagtcccgcccccagccccgggcgccgcggcggcggctgctctcctctttgtaaccgaggagtcaagaaatgtgagaaacgtgccctgtgttacttatttgggagccgaaaatttatgcccagctgaaagcgcccggggaaatattacatcagatgaaatgacaatgattaaaatcagcctctcccccgccccctccccgagcccggaggaggcccgggcgccgcgtggccggccggcggggggcggggggctgggccgcggagggcgctggggcctgggcgcaccgctcccgggagggtcctggccgcggccccggcgggaaggcgcgggcttcgggagaggcgggtggggatcgcccggcgaaaggaggggaaacggcgcgtttttgtcgccaggcgcgggcgcgcggagctaattgcgactctaatcctctgccccgcggcgcagccgagccccgagccaggagtcgccgcgcgcgcccgttcgcgctgggtaatttggggccggatcgctgccctttacgtccgggctgggccgcggcgaggcgctggctaggggctggagtggggggctggttttctctccagcaatcgagggaggccgccggagagagaggagggaggagaggaggtgggagcggcgggagggcagccggagagcggcgcgaggaggaggcggcggcggcggaggcggcggccgcgaagaggggaggaggcgaggggagggtggggaggggaggccccggcgcgccgcgccgcgaggggccgcgtgaagcgggggccggggcgggaggggtgggtggggggagggttgggggcgagagagaaagtaactccaggacgagaccggagcgacccgcgcagcgagcataggcggcgaagctgcgcccggcgcccgagaccggcagctgcgtggggcgggggctgcgcccgagcccgatctgccggctccgaggtaagctcagcgcgggcggccaccgctcagagccgcgcaaccctgccccgaagtggctgcgataccgagaaagtcgcccggccagggtctggacctgggcgggggcggccgctttgtccctctgctgggcggcgggggctggcggcgcgggggtgcccagcacaaaggcctggtgcaagagtggggttgcccacgtgggctggtcctggccgcgggtggaccctccccacgcgggcggtctcggagcttcctgccgcgcggtgtgtgtgtgtgtgtgtgtgtgtgtgtgtgtgtgtgcgcgcgcgcgcgcgcgcgcttgtggaggtccccgcactctggcccctgttctgggccgagcgccctgcagagctggcgagtttccggggtcagaaacgggctcacgcaactggggcttcgggatgcacaagtcccggcttggcgcccaaaatcagagaaagtctccagtgggacagatgtgcgtcctctgacgcccaccccacgagtccgaaacctggcaggaggggctgtcgcgctggtggtggtcccgggcgcgcagggtttggggctgggagaggggccgcgatgggagggatcgccgcctgcagatccggttccccgctgcccgcccgcaccccctgacctggacgcgcgcacccggcacacactcgcaaacacacccgggggcggacccccgcctctgcagcgcctttctgtcttccggcggcccccacccgcgactgcagaaagataagcttcaagttttcgctccgtatctcaaatgtgcatgaaggaatttaactgcacgagtgaataacagcattagtttcaattaatttttttttaatcccggcaacaataaactttgagaacaaaagcgcttttacgtccttaattaggcgagcttcccatctgtggtctccaagtgtctgcctcttgatttaactttgtccccgccccgcctccgcggcaacccctcccagcccagccccgcgcttcgggtgccgcggccaccccgccccgcggcgcctccagccttggcccaagccctctcccgtcgcccctaagttcacaccggccggctggctccgcggcggaggcgggagggggggggtggggaggctggcgcgcaccaggtggcccgcctgcctctccggggccacccctgggacaattgtgcaggcccccaggactttcgccccgggccagcgccctgagtgcggagccgaggggagctcgagaggcgccttctgtttaccttttatggttaaaataacagcttagcaaagaagcgacttcagaagaagcgatttagtgaaatcgtctcaagctgccgcagctcagccagtttaatcacccccagagagccgaacaactgcgagcgcaatgggacacaaaatcattttgtgtgtaaatgagcgtggcattctgctcacttctctctgctcgggcgggcggggctcggcggcgggcgggcagggacccgggtctcccgccgcagctggagaagcgggtcactaccgggccagtttggaaacctgtgggccctcccgaccgctatcgctgaggcccctgcaacaggcgggccagggcgcactggggctgggtgctgggtttgatgctggtgctggtggaatgaacttgtatctctcactgcacccacttttgtgcttctgacttaagcagtggtctcggaaagagggtcgtggtcccgcacggatgcgcttgttgggagaaaccttggagattcacggcaaggcgtaaagcctggggcttccaacggtaagtttctggcttgccatgaacatcaggttgttcttgggagggaaaaggggctaagaacagagtggagcggcttctgtgatggaggcttggtgttcacgtcactttggaatagtgtcctggtattggggaaaacatcttgcagtccgctttgatagaatttcagccagaattccttcctgttcagtttatcctcagcgcgtcttcccttctgactcctcccccagcagagcctcctagggcaggataatccattcctgaggtctgttttggttctcagaactccttgagctaagtgacctggttttgtttttttaagcttgtagaactcaggaatgccaaaagcagtggattctgagtccacaggccccagtgagggtatatattaaacatcactgtctgcccattgcaacctcccaccccagttttatgtcaggaaacttgcccgggcactcagggagagcaaccttgcttacatttgcaggatttgattctggttggattaaaattggatattgaatttcaaggcacaaattttgatcccagagttttaatgggaaaaagcaatcccatgggtcccaagaatttcaagtggtttctctcttaaaggttaaaccttcgagagacgtccagggtaggtttgtggaagccagtgtctgtggatgtgtgaaggggggtgactattcacgtgcaaatctcctctttcctcccttttgagacagctgtaaatcagtgaacggggctgcagaattctgcccctcctgcatagggcctgcaaagcgcccctgggtgtggcttccagggactgagggacaatcttatttcaggtgactacggcacagaggagagttactgagtgcctctggggaggagcagtagaaagggtccattggctgatctgcttgctctgtgcttcctcctggccacctggccatctcctgatgcctcgggggtatgtgatcctgaggggtctggaatgcattaggcatagacaacaccactctgggagtctggggagaaactgtgaggtacagactaggcaaacaaagacaggttttctctgctattgggagccacagagaagaggcggcttcccaagtgacttgccctcatccatgtgcctggacttctgctgaacggcttccctgtgtctggccagatgcaagctgtatcttatcaccatggggatggtattaagagaggtcctaggttccctggcccatggagggtgaggggtgctttctgagccttggtccacaaggctgttgcaagaggagacacgcttggtaacatggcttgaaaggaaaataccaggaaaatctggtttgttctgaaatattttggggcaataatggtgagcatatgtttcagtgctgtcattagccgaattagcagacatggagctgcccagaaaacacatgtgtgagtgtgactgtgtgtgtgtgcatgtatgtgtgtgtcatctgctacagcctggaggcctgctttggggtgtggagacagatagagagatagtggcggtggagtcaatcagggagggctgcatggacctcgcagggtctcagagagcatgcagaaaggacaattctaagtgtctttgaccccatggtacatgactaggaggaataagccttctctggttttgtcgatgcctcccgcagatactctgggcagggatggaagcctagatgcctcaccgcaaggagcggccgagcgggtcctcgcttcacacacacggcagcaccggcaccgcggtgagcctgcagggtgggctgggtccctgccgggagttccctctttcccttcttccccagtgcctgtttactggctgtccttccttgggaccatgacactccaggtggctgttgactggctgtaggattatgtatttttgaaacaaaaatgctcttaatttgatgtgaaatttactacatgtataaaactcaacgccttaggtgctgaggaagtcactaatttagaggtgtctcgttactgagacaaacttgcaaaaaacccctgaatcccaattcacaaattggtgattcgtttgtcaggggatatttcacatctaacacataagcccacgacctttaattagaattttgcagtttgttttatgcccctggaggctgacaccttgaaaaattttttttcttgatttcttattgctaataagcatctttctttttccctctggtactttgaagaaaatgatgcaaatacacttaattacagtggtggccataatttgtcagctgaatatatgatcaggcacgggcagaagtgatctgattagatctgtgatcacactctcaataaagggagtgcatggctgtgttgtggagaaactcttgtgttccgctttgaaactcttgtgttccgctttgtttccatctctaggagggaggaaacatgtcccggctgtctctcacccggtcgcctgtgtctcccctggctgcccagggcatccccctgccagcccagctcaccaagtccaatgcacctgtgcacatcgatgtgggcggccacatgtacaccagcagcctggccacgctcaccaagtaccctgactccaggtaagagtaagccccttgaaacatcaggcatgtgtgggtcagggcagcatctgtaatctgctgcctagggggtggggtctctccccactgtcactccacccaccagggtctccagggtgcacaagctgacacagcctgagggagctagggttggggagtccaagtctgcctgttgaaagctgctatgcacagaggcttgtgaccctgacttggcggcattggtagtgcaaggtggagctcctgacccacctgcaggggactagggcttattcagagccagcccagcctgagcctgccggcagcgggcaggggagtctcacgtaccttcaaggttcctctggagggagacttaggcccggcccctgcagggggtcatttgtgagtgatactgagtaggtaagtcttgggggcatgggggtgggtatttaatcctattttctattccacccctgggaaattcacaaggggagggaagaggagctgtggtgagctgcagtgtgccatctttgtcattttccgtggccactgctgggccctagaggctagcagcaggcttcccttggagctggtgctgcagtgactagctaggaatgaatcacatacctcatcagtggataaagggtctctggccaggaccctggttgggggctcacaggcaccctccatgctgctgaacttataggctgcccaggcccttgggcctgcgagaggtttggggtgctgggtgctgccagctctcctgctcttccttgcagggtgtttctctcctgggtgagggacctgctttccccgttggcacggcagcagggctgacccgagtagggtgggtcttgagcagcttgctcagccgaggatgtttgctcctggcacagagaggcggtcatcgctcccctggggctgctgaaggctgagcgtgggagggccaaggctgtgggcatcacccctgtgttatgcatttgaaataacaggaggagttaattaatcccccagatactgagggatcatctctggggagcatacacggcaggctgcattgtcaccggtgtggttcctcagagcagggaggatggtagtgcgcagaggtggctttccaagcctgttggggctgcaggggagcctgtgcaggtgcaggcatggtcccttgaggaggaaaaactggaaatgggtgcagtgtctagttccaaatttggagagtctagggtacagatggtgactggtgttccagtaccccaggtggacagagactcagcctggggccctgtggccttggggcttgtggggtggggacaagagccacggggccaggtcagcagtgttggcctgtgtgctcactcacagagccctgtctaggatgggagatagattctgcttatttaatttccattttgccttctgcggcatttctgagttgtttgagatagatcatcccttaatcggttgacgacgtttgtgagtgaaattcataaaacctttgcccacaaccctctctgaagagtttcctgaaatcagagagttgcctgtctggagtaatcacagcccaggccctgggggaggcgggtgggagaggcttctcattctgggctcttggctgctgcctgagagcaggagggcagggggccatctccccccacccagccccactgtgctgctcacccattgctttgttctgctgtgggatgtgctctcatggggagctagggcccctgtggccctgtgatctggcacttgggaccctcctggtgtgcccaaggggtggcagtctatgtttattcttccccagggctggggctcaaggtgaatctgttgttctgcctggatggcctctggctgctgtgggggtgctctgtaggcctgaagctttggactagaggccagggatggctgacctgcaggacaatcaggggacaggaggccagggggcctgagaagtgggtcaggcagctgtgctggcaagagcccctcagatctctcttgtccttcctgtagtggattattataatataagcagttttctaccaattctggaaaaaatcaatctcacctagtgtcactgatctaggagacacctggagatggaggactaagagtgctgtggtcctcagggggtttctggatggtgaagatgacctgccctaggcagcattgtaaaagctgggacctctaccctcggctcccctgagaactctgcctgagcctctgggtctcggcggttggggtggcctgggtgctggagagtctcgtgctgggtgactcctctggtctgcctaggagcagtcactggtcctcacccgagacagccaagcacagccggggctgggagtggattccctgggccggcccccttgctggtgtcctgcctgcttgacccccgttagctgccgccatcacagccacactctgacatccatcctgactatgggaagcatcaaatgaagatggccaggagcttcagaactcttaaaacctggtgcctgaaacagccaggaaattggagccagagcttaaaaaaaaaaaggaaataaacgagaagacgaaggccatcctgatgctcccccttgtgcacacagggcaggtggttggaggcatcttttctgcccctgagggtcccacctgctgcagcgtgaactggccacctcattccatggaggacttcggaagccggcccctcaaaccctgcatcctctctcagagggtggcctgggccattttccacagggaacgtggagcccctgacagagctgggaactcatacctgcagggctgagaatggctgagggctcctccatggtgattatcctcacctttcctcaacctgctcacgtccttggcagcctcagacgctgagggcatgaaaggcctctgtcctgggagaggcggtacagctgccgcttgatccaggagcctatactgaaccatggaaagatctagaatcagcctgtcctgaaataaggcagatggaaaaccttctaaacttggaccgatgagacaacctagaacccatccagccctggaatgtgggtgcatcaggagtcttctagaccaacaggaccagctagagcctcagccagacctgacgtcagaagggttgggaactcagccaggcctagaatgctgcctgcttacatggactttggagctccactgggaagggtggggagagttcccaggaggctgagggtttggatctgctgactcaccttggatgtagctcttacttcccaccggtgccacacatggacctcagccacctgccaaccactgcccatggtatctggcagcctgggacagacccatctgtctccaggaatgctgggtggccctcactctgacatctggatgcccacgctctactaggccaggtcctagggcctttgtaactggagccagccgtggaacccacagcctttccagcaggggctgtgacctgcagtgccattgtcaccaggcctagggggttgacagggctcatcggcctttggagctctgagatgagttgtatctgggtggctgcagctctgggtccacagactcgggctcacagcagactctgacctccccatgcccatccacgagacagccttgcccttttctttctttcttttaagcgacagcgtttgtctttcttggccaggctggagtacgtggtgtgatctcggctcattgcaacctcaaacgcatggactcaagtgatcctcccacctcagcctcccaagtggactacaagtgcatgccaccatacccagctaatttttaaattttttgtagagatggggtcttgctgcgttgcctaggctggtctcgaacccctggcctcaagcagtcctccaccttagcttcccaaagtgctgggattacaggtgtgagccacggtgcccagctaaaccgtgccctttatactaccctgctaggagagaaacctgcaccgtgttcccagagactccatacccgggcagaccatcatggctgatgcattgagtgtgctgggccatcagagcataggatggtgtggacgggaggccctgagggcagacttgggggctctgactccctcagctcctgcccagctagtgtgtcctgggtgcaagtggcagtggggcagggccctggagacggctgacttggagtggacagaggagtgggctgctgttagaacagggggcatccctgcaggggtccctgctggtgcaggcagagagtgaggggcttaggctccagattgtgtgcaggccgggctgggaagcctaggtcccaagttggagctactgttctcccagctgtgcagagaagctgccaccttggcagggtccagctgggcaggagtgtggccctgcctgctgaaggatgtggtggtgctgcccttggggaaatgatgccaacttccctcctgttcccaaaccaagcccttggctactcccacccctctttagggttcctagttatccctagctcgacctggggtctgccagggcagttgccaaaccagagctggccaccctgggcactggggaggtggtatcagccctggctctgaggcctggctccttctccccggagtggacagggacaggcatcaggggctccccaagacccttctcctggtcttgcatttgttagaaccattgcccttcagaggacagggtaccggcacctgccttctctccagtccccatccgccaccactaggtgtggtgtgcatacgctctggcatgtgtgcacatatgtatgcactgtggtgcatgtgtgtgcatggtttctgtgtgcgtgtgtgtatgcctgtgttgtggcatgtgtgcaagggccctgttgcatgtgtgtgctgtggcacacttgccatccctcctgtctgcctctgtttctccctgtgggctccctgagtgagcggcagtaggggatttgtgccgtcatgtctctgggtgcctggtgttgacaggtgtgtgtcctttcctggatgtgtctggatctgcatgatatgtgtgtgttgggaaggaagggaccatgtgaccctgtgcctgttgcacaggcctgtgtgtctcacactcgtttacatgggttgggtggggaggatgtatgtcctggctcgtttactgggtgtgtggctgttggccggggtgttggatggttcatgtgcattttctgggtgggtctatctggcaagggtgtgtgcaccaggcctgtgaccagctggtttgtgtgtagggggtaaggtgcctgtgtcttgctatacctttccaggcctgtaacataacgtgtgttggcaggctggtgtgtacagctgggtgtgtccctctctggctgtgacttgcgggtgtaggcaggatgtgtggtgtgtcctgttaactgtagcctggctgccccaggtgtgtgcagatgttgtcaggcctggaacagttccagagtcacccatgtcaggtccctcgcccctccagccgtgtgggccctcaggagtgggggcggggtgtgggaagacaggcagacttgtccccatcccttcagacatcccacctcgcctgtctctcccaggataagccgcctcttcaatggcactgaacccatcgtcctggacagtttgaagcaacattatttcattgaccgggatggggagattttccgctacgtcctgagcttcctgcggacgtccaagctgctgcttccggatgactttaaggtaagtccatggctggtggcccccctgcactgcctgtgtgatggcattacacaggggacgctgtgacttaataagtggacccctggttgtcatggtaaccataaaaagttaaacgatgaagccgagggctaaatcagtttttctaaactaattttgttttctcacatttttagcttatttatcagggtatataacaacaatcaagctgcagaacgtatcccagctgaacatttgtcgtgtttaaggatgggcgcgtgccagcgttatagtagttagaggttcataaatctgttccatcggctgggtgcagtggttcatgcctgtaatcccagcactttgggaggccaaggtgggtggatcacttgaggtcaggagttcaagaccaacttggccaacttgatgaaaccccatctctactgaaaatgcaaaaattaggcctggagcggtggctcacgcctgtaatcccagcactttgggaggccgaggcgggtggatcaccaggtcaggagtttgagaccagcctggccaagatggtgaaacaccgtctctgctaaaaatagaaaaattagccaggcgtggtggcaggcctgtaatcccagctactcgggaggctgagacaggagaaccacttgaacccaggaggcagaggttacagtgggccgagattgcgccactgcactctagcctgggcgacagagcaagactccgtctcaaaaaagagaaagaaaaggacggctgtaattagacttcaaaaaataaagtataaaaagaaaaatgcaaaaattagccgggcatggtgacaggtgcctgtaataccagccacttgggaagctgaggcaggagaatctcttgaacccaggaggtggaggcggaggttgcagtgagccgagatcacgtcactgcactccagcctggatgacggagcaagactctgtctcaaaaaaaaaaaaaaatctgttctgtgttgggcaatttgcagggagaaaagccctgatgaccaaacagataccctttaaacaaaaggttaacccccaggtctccgggtgagcccgtcagggcaggtgacctggttccctgggtcatgcctcagtgctgagcccctcccacatgtcagggactctgggaggaaggaaactcaggcctggggtacactggcatgtattaatactagcaaatgtctgtccttccttccttcattccttcctctatccagaggaccagtagccctggggccttgtctttcatccagctcagttactgagtgccagcctctgaattcaggctgaaaacagtgaaacacacacactaggacctgccccacaacacttaacagtctagcgggcagacagatactgaacttgaagtccatgtgacctgggctgggcgggtttgaaagaaatgatgttcatctgggtggtgaaggcagaacggggccaaacaggtgtgagggccttggtgcaggggatgggggtggcagatggcttgatgcattccagaactggaaagaaggtgtcaagcctggagctttatggactgggaggggaaggtcaggaaaggaggctgctgtttgatgtcaggaccttggtgggtggcccagtgcctggcatttaactctgaatgcagtggaaggggtgtgtgcaggggaagggcagtcagatctgcaaattgggaagatctctctggctgttgggtggggaagaaggcagagaggggtgggggtgggtgcagtgaggcaattatggatgaggccccttccccaggccaagggaggctgggtggaggctttggatggaccaggatggagatagagaagatggagcaaggtggcacatcagacttctgtttagtacaggcacagtggctcacttggtcatcccagcactttgggaggccgaatggggaggatcctttgaggcctggagttcaagaccagcctggacaacatagcaagatgctgtctatacaaatttgttttttaattaaaaaaggccgggtgcggtggctcacacctgtaattctagcgctttgggaggccgatttaggtggatcacctgaggtcaggagttcgagaccagcctgaccaatatggtgaaaccccatctctcttaaaaatacaaaaatgagccgggcgtggtggtgtgcacctgtagtcccagctactcgggagactgagacaggagaattgcttgaacccaggaggtggatgttgcagtgagctgaggtcacaccactgcactccagcctgggcaacagagcaaggtttcataagtaaataaataaactttacttttaaagttttttaagagtaatttatttacttttcataagtaaataaataaacaagcaagcaagctgcaaaagcacgtggctgtggtagtgtaaagggcctcttgcaggtgccccgggacttgtggcttgaattctgagttggtaagttgaggcccggggtggaccaggctgtgggagtggggtttctgcccctgcatgggagagctggtggggcatcagatggagaaatcctgggccatgacaaaagatggggttgtctgtcatgcagttgtcatttaaaatctcaggagaatggccaggagaggtggctcacacctgtaatcccagtgctttgggaggccaagcaggaggatcatttgatcccaggaattccagaccagcctggaccttgtgtctacaaataattattattgttattattattattatcctggcatgatggctcatgcctgtagtctcagctgctcgggaggctgagtcaggaggatcccttgagcctgggagttcaaggctgcagtgagctatgatcacatcactgcactccagtctgggctacagaatgagaccctgtctaaagaaaataaaataaaaatctcaggagcaagtgagagtggagagagcagaggcccaggatagagccctgaggagcccttgcatggggcaggagaggcaggatgggccactgacccatgacaggcccagaggtcagggttagaatctaggcctccctccaggcggccagcaggtggaagggacttagggcctgtaggtcagggggctgggcttccttgcctcttcctcaggcatgagtcatggggacctatgggaccttggccattcccagtggggtgggtgtgtgtgagcgtgtatagtgtgcatatgtggcccagggcatggggccagtatcagcgcctgagggacagtctgtgcgaggctgcttagcccagaagggggctgcgtggcagggggcgggcttcccctccctggacactttatcacactctgcctgtttgggcaggggctggaccaggcacttggcacatcttgcatcctttgatcctcactttcattctctgagctggttgtttatgtccattttatacataagggaactgaggccgggcgcagtggctcacgccttgggaggccgaggcaggtggatcacatgagggcaggagttcaagaccagcctggccaacatgggaaaaccccatctctactaaaaacataaaagttagccgggtgtggtggcaggcacctgtagtcccagctactcgggaggctgaggcacgagaattgtggagtttgctgtgagccaaaatcgagccactgcactccagcctgggtgacagagagagtctgtctcaaaaaacaaaaacaaaaaaaaaaaacaaaaaaaaacgaaaaaaaaaccaagaggctcagttagtgaggtatagaggtttagaggtctcagggcaggttgatgatgaagctgaaaatctgacccaggcaggcttggctggagaagaactttttttgcttccgggtaggctgtgagctcctaggcccggctgccctgtgcccagcatgatctcttctctcggtgggattctaaggcagcagcaggtccccaggcataggcacagcctcgtcctttagtggagcttccaggtctttccatggggaggcttcactgcccagtgcctggggccagatggaagggctcaggggggctggcacaggtgcacatcagcggctgcccttgggacaaggctaggttctttatacttgcaaaccactcagttgccccatctgtacaatgggtgcaaccggcccagtccacacaataccctgcgagtcgcagttcctgcagaattggttggaaccggcaggccgcctcccctctcccccttcccccaccacccctactccgacacccacatcaacaccctgtgcgcctgtccccaggacttcagtctgctgtacgaggaggcgcgctactatcagctccagcccatggtgcgcgagctggagcgctggcagcaggagcaggagcagcggcgccgcagccgggcctgtgactgcctggtggtgcgcgtcacgcccgacttgggcgagcggatcgcactcagcggcgagaaggccctcatcgaggaggtcttccccgagaccggagacgtcatgtgcaactccgtcaacgccggctggaaccaggaccccacgcacgtcatccgcttcccgctcaatggctactgccggctcaactcggtacaggtgagggctgcacgctgccccctccccgccgcacccccggcgtccgcggagccctccaggggcagagtgagctggagggaggcgcgatccctgaaacggtgaagccccccgtgccatcctacaaaaaaggcaacaatgtgtcgatgcataatttatgtccctctcataattaaatgatggcgcctgggggatggacttaaaaaaatcgatctgtactttttttttttttttccaaaaggatgttctataaaaatggcccagagtattttcaacaaagcgtgcttcatttgacacccagagtctgactttggattcgaactaaacccaggcaacaggcgaggcaggacagaggctgagtggaaaggtggtctggagccccttccctctccctgctgacctgggagtcgcaggcacccaccagctgccaagagaatccctggaccggctcttcctggatgggtccaagaattggacagctcagatggagtgagggcctattttccaacagctcttcgcagacccaagagcttggcacatttccgggttagggtggaatgggctttgcagggaagagggccccctgtgcacgcattccacagcctgtcggtcagaacttgctagttgcaggagacgggtgttacacgcagtcatcagacctcaccctcacagaggcacaaacccacatagttgtggacgcctgcagagactcaaatattgagaggacttctcctttttctctccctccagagctcccacgagctgatgcacccccaggcttcaaaccacctggaatgcacagctcagggaagctggtggatgcctagaggctgaaggacagggaactctccattattggggcaggactcagggaggacacttggggccatgtgtctggagagagggcataggttacaccctacagaataaagaagggacccaaagcctctttttgcctcccggaatcaaggccctgagggcagcaggatggtggcctgggtggggtcgtccaactaggtttgctaacctgaggggtcactgggcctggccacttctgtccctctggtggtggaacccagcacgtggttctgtagggacctttgtcagtgagcaagactgagatcgtcacaggagaaggtgcccttgctggctgccccagcaggcacccacctccctgccaggccaagccaggtgtcctcttgcagcttggccttgatgacctctgtttcttcctgggcaggtcctggagcggctgttccagaggggtttcagcgtggctgcgtcctgtgggggcggtgtggactcctcccagttcagcgagtatgtgctttgccgggaggagcggcggccgcagcccacccccactgctgttcgaatcaagcaggaacccctggactaggccctgcttcagtgcccacctgggcccccccagggacctggaaacagtgctggggagttctgcctgtgtatacttggccgtgggcatgagaccgagggtgaggctggagggtccaaagctggcccagcgagcaccagggtcccaggtgtcatggcaacagaacgtgggatgctggaggcatgcctgcagaaggactgttgatgcgacccaaagatacagcggtgggatctctgctgccagctctcccagcccctcagcttcgcagcctggcgcagcatcctctgaggccccggggcctgttggggcggggttggaagagccgtctgcagctacttcagaggagctgtttatccctctccacgcggggcagactctggcgggtctcctagcgtccgagagatggcttattttctacagtatttaaaatggatgcagccctaactgcaaaagtcagagaggctgacaaggaccaatgcttctttatctggtgctcagttctcagtcagacgtgcagcatggctgcagggtggaccagctgcctggcattcaggcccagatgcctgcagggctggggctctcgggacagatgcagggatgtgtgctgcagggctgctgggaggagagtggtgggggcctgagggctgagtgattctgtaaccacctgagaccttcacgtttgctgccgttgggggctcaggctgcactccccgggtcacctgacctgctgcccaggggcttccagtcctgtctgtgtggactggcacctgggctgctggagaagtctcctcccgttcggaccagcctcagggctgcacgttacctcaggaatgggccccaccatgaaggggcccatctgtcagcagcgtcttctaggtccccagctcagggagccatccccagctccagttttctcatgcgaatatgcacagttttaattcacgttgttacactagcctgccgatgagacccagacacaggcagacctggcgctcttgacccctgattccagtgaggactggccctgaggagtccttgcagacctgctgcctcccccacgacaggcccaaagatggaccccccctggccttgtgacagctccccaagtgttctccggtggagaaactgcagaggactggtgggcggggctccccagccatcaccatcctgtgtacaatggctgtagacttgtatatggctcctttaatattgtaaagatgctgatgtacaattgtcgtgcatttgtgtgaacacattgcgttcccagtccatgccataaatgatgctctcaagcaaaagactggaggctctgtcctgtgcagaagcagcagccagactcccgcattcgatgttgtgcagggaggtttgggggcggaacggattcctcccttggatccttcagttcccatcgaggaataacccgcagcagtggtggaggaaggtcagtggctgggtcctgagcttggtgttatttattgcatttgggtgcctgtcccctcagggcagcacagattctgaattctgattcacagtccctagccagatgggaactgggaaagagacagaaggcgtctgggtgcttttgaaccctgtctcaaatgtttgggattttctctctcactattctttggttggggatgatgtcctctttagacccccacgtaatggtatgagaaggtggcaggcagtggctcagccagccagggggcaccaagtcatgcagccagcgtgagacctgcagttcacctaagcacagaacgagatctcagtatgcctccatgtaaacagattcacataggcctccaatttcaatgagaccttttgcattttttctcaaagcccttatgttctaacccatgagaaccattttacctgccctctaagggccaccagcttcgacctgcctcaggggacagcagcacagaccagtggctccctgtccaaggccgcagagcagacgccatcccactgtacaatcgaatttgctggacaaacttgataggtttctctgcttagcaacgagcctatagttagttggcacatctgcgttttggcatctgaggctcccatctgagtggaggagaaagtgttgtgtttattagcaggaagtcttgtgaaaacagctcgctgctgtgtatgtttatggatttttctgatataacagccagcatggttaccgagtggtagagattctcgaacattctcaaactctctttttgggtaaatgattgtgctaaaaataaaatttattaataaagaaggggaaaaaggagtaactctacctgactaaatgttactctaatttatttatttctttactaattaagtaaaaccaggaagtatgattttacatcaaccagagaatttctgaatttatagggaaacactatgtccccataatgatgctataattctaatatatctagtccccataaacagtaagtacaaattatcattcctttaaagcatttttacacttcctggaatgagtatattatcagcaatcttttgtcaaatgccagccgtataaatgttacttctgctctttgtaaacctcaaaactcattattcttgattataagcaactggacagaaccatgccaaagcttccccgtttcccaccaaacccctgccagtgagtgcagagaactcgcaaagccacagcaggcggtctcagccaccgtcccgctcacaggggcccaatgccaggtcacaacactaagaatatctttcaaaaaatgtgtcttttttttttttttttttaaagctactgcttgactgttccttagaataaataaaggatattttataaattacagctctagcccttggtttgtaattcacggaagcagccacaatcaggtactccagcattggtcctcgggaaccaccactccccacacttgggacctggtgtggctactgagtaggaccttaacatcccaagtcccaaatcccaaagcttcctgatttgaggactgaccagagagcagcagcgttgtctctaggcgctcagtgcacatgctgttggcagatctggcggggaaaatggtgcaggcatggcctccctttacctctccagacccccaagcctggactcaagtgttcaggctgtgatgagcatgttgcactacgttggtgttgcatacatgtatatctgtggaccaaaccactaacattcaaaagaaggaaagtgggcgggtcacagtgactcatgcctgtaatcccaacactttgggaggctgaggcgggtggattgctccagcacaggagttcaaaacgagcctgggcaatttggtgagaccccatctctacaaaagaatttaaaaataagccactcatggtggcatgtgcctatagtcccagctactcaggaggctgaggtgggaggatcacttgagttcaggaggttgaggctgcagtgagccatgttcacaccactgcactccagcctagacaacagagcaagccccgtctcaaaataaataaaattaaaaagagaaagcatggctgggtgtggtggctcacacctgtaatgccagcactttggggccaaggtgggtggatcccctgaggtcatgagttcaagaccagcctggccaacatggcaaaaccccgtctctactaaaaatacaaaaaaaaaaggattagctgggtgtgctggcatgtgcctgtagtcccagctactcgggaggctggggcacgagaatcgcttgaacccgggaggcagaagtcgcagtgagccgagatcgcaccactgcactctagcctggcgacagagcgaggctccatcttaaaataaaaaaataattaattaaaaaaaaagggaagcacagatgtgagaaatggggaaactatatccattgagccactgaccaagataatatttaacttgactaagcctagcagagcctgcccacttcccctccctagaggccaacccatgttctcgaggcaatgctgtctgccaagatggccccatcccatcaagccctgccttccctcctgattctccagagacaggaaaatggctgcattggccctggaagatactcaatttctcctaagtagatgacaaggtggaaaatacaaaaatgggaaactgccaggggatattcagttggaggcaggaaatctgcctcagttcaaaacaatagggaggtctagacagagctagagggacaactgatggccagagaaggcagccgctggcctggatggagtctgacatctgggctgatgtagctgttgtaggaagtaggatgtcacaggttgatggccatctcaaggggggtaggcaatgtgtttagccacaaggctcaagtcagccaagtaatattggtcttgtcacatgtgtgatgagaatgtgggtggctctctttgctcaccccaaccccgcccaaaggaggagtttccttgtagagagagggcttgccctcacctggagatcaggggctggcagctgtcttatctctgatggaagatttgatgtggagttacctgcactgaagagtctgggtcactgtatagggtaaaagcccacatcgttaactgccacaaattttaaaattttctacaaatggatttgcttagaatgaatggtaagaaaagggtcaggtgcagtggcacacacctgtaatcccagcactttgggaggccaaggtgggtggatcattttaggtcaggagttcgagaccagcctggccaacatggtgaaaccctgtctctactaaaaatacaaaaattagccaggcatggcggtgcgtgcctgtagttccagctactcgggagcctgaggcaggagaatcgcttgaacctgggaggcagaggttgcagtgagccgaagtctcaccactgcactccagcctgggtgacagagtgagactccttctcaaaaacaggaaaaaaaaatggtaagaatagaaagatgatattaatgcatatgtgtcaaaagcagctcctgcctttattagtgagaagtttctcattagatcaaatgaagtttcttgtcagtatccagagaaacctacaaaggcatcacaaagataaagctctaacgtccaacataaagcccgagacaaaagatggtctagagcacctgcttggaggaaggtctatccaggaacaactgtatttaggttaaactgctaaattcaccaactagggcagagaggcacagaaacattccctccagaacccctttccattaagagttcactcctgtcaccacattctaggcagccccgatgttctctggaggaccggtgaggtaaggtaatgctttgtggactaacagaaagaaaaaagtgttggtgacagctaagggcagcttcctgccagcaccaagactagcgctgatgttctcttagaagcaccagagttttctaaggtgacccaaatggaacacaaccccagggaaggttgaaagtcagaaaagaagagcgcgtctctgctctttctggatctcacaaccagcgagttctcgcagccatggcctctgtaagcccagggacatttctctgtgagctttcattggaagggaaaccccagccccagagaagcctaccccgccacatcccaggctaatccctggatctggttcaggagctctcttcctgcaagccccaaagctagacaagcagagccctgccaggcccatggtgacctctgcagacctaggaactgcaggcagagttgggggctcgttcctggggaggggcccacccctgaggttgtgcatccaggaggggcccacccctgaggttgtgcatccaggcatgactgactgttggtagctgtttaccctcagggaaagagaactttctgtgtttttatctccacccccagtggaaggatatgttgagtagagtttttgctttttgaggaaaagtcatgatttggaaaggggcgctgatgtatctgttgaggctttggatgttgatttttaaagggtccctgcttccctgcaaagatccttatcttcacaaccacccaagagcaccacttattggtggccagcatatgccaagcactgcaggtgcttgggagggcaagatagctcatgaggcttggagcagacatttgtttatgcacaggaattgttcactttttttcttctcctttttttttttttttgtgagacagggtctcactccgttgcccaggctggagtgcagtggtgcagtcttggcttactgcaacctctgcctcctgggttcaagcgattcttgtgcctcagtctcccgagtagctgggattacaggtgtgcaccaccacgcccagctaattactgtatttttagtagaggcggggttttgctttgttggccaggctggtcttgaactcctggcctcaagtgatcctcccaccttggcctcccaaaatgctgggattacaggtgtgagccattgcgcccagccaggaattgtttactttcaattgtgtacttgaagctctgtaaatttaacaggaagagagaccacattgcagttttccacttcgtcatgacactgaacatggattaccccaaatgcattgatttgcatgtagagagaaccacctctcaggcctcaagactagcgtctccatagcaaaggaagcttctgtgaaattctaatgagagacccagagaaagaggcaggcacactcccggggacacacaaaggagaggggttaggggtcagctgcatttggggttttgtctttatttccattacacagaacagccagtcccgacagcgcccaggccccacaggacaatgctgttcctggacccggagccatggccgtggaataagagctaggtcttcagggcctcctcctaggatccttcttaacacagaaatcacaaaccaggccaaagtcttaaaaagcagagcctgggaggggcagggacgcccaagccacgctggggcccgggaggcctcccgtcctgcccgcgggagaacccaggccgcgcatccctggctggacggcgtcaccagccgtagctgggccaggcctgctgctcaaagcccgtgtctaggatgtcaccagagctcccttttctgtgtcctggacccggttcagggcccccgaggaagctgcggtttggggcgagccgattgcaccagcagggccgggctgctgctcccggggctgacgcgggccacgccctcctggacgcggacacacccccatttccccgggcccacagagccacgcctggccctgcagccaaacagcgggaaggcagattggtacgagtaggtacaaggccctggaattctcgcccggttgccacacactgcacggagcataattgggggaggttgtgcaactgcccgggaagccggggctcgcaacgagggctctctccaagtccccatcacaggcctccggggagcctcgggacagagcctgacgccaccttcgggtgacatcgatggcctcgctctggcagaggagtagtgtggctctgccgagaactggggagcccgggtccccgcagggccaaggggagggagggctggcggaaggggccgcgcccacagccccaggtggcagcagcggcggtggcggtcccgactggcagagcctaacgagaacagggcctatccccaggggccccgggctggacgcagaccagatctcgcgggggtgggctgggaggcgcccgccagaggccggaggctgacagtgcctttcctatcctatgggtctattgtgggcccgcggagcccccatgggtgggtccatccccgggcccagtgagtcacttccccaggccccggaggccttcgtggaaggtgcctccctttccggcaaagcatcctttgttctcctgctggctttgcttcccaatcctctctgagttgcaaccttgagggttttaggggcaccaagctcccaggagcacagaggtgggcttgggtgccacctggagagcgggctgcagaaggctgcagctgcttttttgcttcctcagttccctgccctctcaaggcccaggctctcccacctccccagacgtctggggaaacccacactgccctgcataggttgtggtgtgcagcctccggactgcagatcctgaacgcgcatcaggagggagggagggaggtttcgatgctctcgccctggccagcaccgctctgagttgctgaactggcctcaaggcttctcttgcatcagggagaggcttccggcaccaccactggcactcctccttctccctccctttagcctcccccagttcccatgcccaggtggaggaacccgtgtagaagcccagcccagggagggaattcatcaaagcaccttcccacacagcctctagtttgcctcctctccactcccaccttccagccccagcctggctagccacgtggggggctcctgtgccaaggagtgcccagctgccgggtgagtgagcagccctgcacagaaggcagctgactaccatacacactacatgtgtggagagcaccagccttgcagcctggcgaggctcttgctttgaagaaatagaagactaattattttatttatttatttatttatttatttatttatttatttatttatttttgagatggagtcttgctctgccacccaggctggagtgcattggtgtgatcttggctcactgcaacctccacctcccaggttcaagtgattctcctgcctcagcctcccgagtagctgggattacaggcgcccacaaccacgcctagttaatttttgtgtttttagtatatgtgctgctgaagtgagcatgaatttttgtgtttttagtacagatggggtttcaccatgttggacaggctggtcttgaactcctgacctcaagtgatctaccctccttggcttcccaaagtgctgagattacaggtgtgaaccacggcacccagccagaaaactaatttcaaaacaaaaacaaaagcacccctgtatgcacagattctcaaattgtatttactattggcaaagaaaggaagggggccccttagtgtcctaaaaccaggagagatgaaatcgattatggaacatcagttgatgaaatacatttatccttccacaaatatctactgagtgtctacaatcagcctggttactggaggccaggctctgagtcgtgagtgtcccatgaatcaccagctctccaaaccctgacatctaacaccacccacttcccaccctccccaggaagaaacaatatttaatagtttcatttacacagaaaaagaaggtgcaagctctctccctaaggaagagccaaaaagcagcctcaactggctccagagcctgtgctcctggattaagaacagagatcagtgtattggtttcctcttgtggctatgacaagttaccactaatgtggcttagaaaaatactatttttttttctttttctttttgtagagacaggtctccctatgatgcccaggctggtcttgaactcctggactcaagcgatcctcccaccttggcctctcaaagtgctgggataacaggtgtgagccaccatgcctagcccaacactgattttaagatgatatattttcatcttacagttccagatgtcagaagtctgacatgggtcacactgggctaaaatcaaggtgtcaacagagctgctctcctttctggagctctaggggagaatctttccttgtcctttccagcttctagaggctgccttcattctgtagcttgtggtcccttccttcatccccaaaaccagaagtgtagcatctttagatcccctcacccttgtttttctggactctagtgattccattgcccaccctccaccctgcagataatctccctattttaaggtctactaattcaccttaattccattggcaatcttaaacccctttgccacataacctaagatactcacagatcccaggtttaggatgtggacatatttggtggcattattctgcctgccacatctaggtagcaactttatctactcaaacaattgttattgaacacatgccctctttcaggcactaggatatagtagtgaatgaatacagaaaagccccaatcttgtggagcttacactccagtgaagagagatggacaagaaacaaaagtaaggctgggtgcggtgggtcacacctataatcccagcactttgagaggcccaggtgggaggatcgcttgagcccaggagtttgagaccagcctgggcaacatagggaaacctcatctctccaaaaaaaaaaaaaaaaaaaaaaaaatttgccaggtgtggtggcatgcacctgtggtctcagctaatccagaggctgaagtgagaggattgcttgaggctgttgaagctgcagtgagctatgatcacgccactgaactccagcctgggtgacagagcaagaccctgtctcaaaaaagaaaaacaaaaaataaacaacaaaaacccaataacaaaaataagtaaaatgtgtcataggttaaatagtgctaaaaataaagcaaggaaggggaataggagtgtgtgtgttgctattttggacagtatgctggacatctcccatttaccctgccccctgccctgggcctggaagctgacattgtgaacagtgtgaaggggctcccttaccctctggcttcctgttgggcatggctgatgggaagcatcttcaggagactggagggcagaaggcaagtcagcctctctcatcactcatctaaagacctcagccctgggccaggcccagtggcttattgcctgtaatcccagcactttgggaggccaaggtggaaggattgcttgagtccagaagttggagaccatcatgggcaatatagcaagaacctgtctctatttaaaaaaaaataaagaaatatttcttaacgggtatggtgacatatacctgtagtcccagctacttgggaggctgaggcaggaggatcccttgagcccaggagtttgatgctgcagtgagctatgatcatgccactgcatgcccactgcctgggcaacagagcgagaccctggttctaaaaaaaaaaaaaaaaaaaagaacataaaataaataaataacaaagacttcagcccctgccagaggcttttctcacacagcccacctggctctgagaatacctctccattctccccttccagcctagggatggtaactatggttggctatactacccctgagaggactcattacccctgatttctatataccctgccctcacctttgtaaatacaggttgagtatccctcatctggaaatgctcgggaccagaagtgttttggattttgctttttttaaattttggaatatttgtaaatttatatgtaatgagatttcttggggataggacccaagtctaaacacaaaatttatctcttttatatacatcttatacacacagctggaaggtaatcatatagaatagtctaaataattttgtgcatgaaacaaagtttgtgcacatggagcagcagaaagcaaaggtgtccctatctcagccatccgggtggacaatctgtggtgggttggcatcaccaacattcctttttttttcttttagaccaagtctcactctatcacccaggctggagtgcagtggtgccatcttggctcactgcagcctccacctcctgggttcaagcgattctcctgcctcagcctcccgagtagctgggattacaggcatgcgccaccacacccagctaatttttgtatttttagtacagacagggtttcaccatgttggccaggttggtcttgaactcctggcctcaagtgatctgcctgcctcagcgtcctaaagtgctgggattacaggcatgagccaccgtgcccggccattcctgactctgaatttatatgctatcaataagtaatccatttcttgcacctatttacacataagtacttaacagtaaaaaatttggtataccattcataaaatgaaaaaaataatgtatttagggtacctaagcagcatggtagcatcacaggaataccgcatcagtggttaaacagcagagaccaacaatggcaaagctttcagtctcttacctccgatgctgcgttttgattcaaaggttactatatttgcattcagcaggaatggggtaaagaaaaaaagatgaaatataaattaattttacaaaagtaaattttaaaaggttactatacattctatttttaaatctttattattattattgagactgagtttcgctcttgttgcccaagctggagtgcaacggcgcgattttggctcactgcaacctctgcctcctgggttcaagtgattctcctgcttcagcctccagagtagctgggattacaggcacgcaccaccatgcttggctaattattacacttttagtagagatggggtttcaccatgttggccaggctggtctcgaactcctgacttcaggtgatccacccacctcagcctcccaaagtgctgggattacagatgtgagccactgtgcccagccatatacatatgcatggtatatatatatatatgcatggtatatatatatatatatatatatatatgcatggtatatatataaatatatatatatatatatgcatggtatatatatatatgcatggtatatatataaatatatatatatatatgcatggtatatatatatatgcatggtatatatatatatatatatatatatatatatcatgcatatatatacacatacatacacatacaccatatatatgagtaatgtcttggccccacgtgagacattgtgaggaacctgccgttggtgcgtccagcctgaacacgtgctgttttattacgctttgtgggcgtgcttatgtggggatctgggtgagtgtggaaaagacatattgctgctgatgggagctgggaagtctttgattccttggagacagtgaataaactgtgtgttgtgtgctcatgttttagctccaaaccattacatgaagtcaactgtggaattttctacttgtgacatcagggtggcacccaaaaagtttcagattttgaagcattttggatttcagattttcagtttagggatgctcagccaatagtactttattaattggcgagtgctgtctgttttcaccaggaaggcctcgctgagccgcatgtaaaatttaaataaagccccaaagaaggtaaggcaggaggctgggcgggatggctcacgcctgtaatccggcactttgggaggccgaggtaagtaaatcacctgaggtcaggagttcaagaccagcctgaccaatatggtgaaaacctatctctactaaaaatacaaaaattagctgggcgtggtggcctgcgcctgtcgtcccagctacttaggaggctgagacaggagaattgcttgaacctgtgaggcagaggttgcagtgagccaagatggcaccactgcactccagcctgggcgacagagcgagagtccatcacaaaacaaaataaaataaaaatacaaaaattagccaggcatggtggcttgcacctgtagtcccagctgctcgggaggctgaggcaggagaatcatttgagccccggaggcagaggttgcagtgagccaagatggcgtcactgcactccagcctgggtgactgagcgagactccatccctgcccccggcaaaaaagaagaaggtaaggcgggagaaatgcagatttctggcagaagagcatttggggcaaaggggctgcaaggcaaaggcctcgaggtaggagtgtgcatgatgtgtctcagaaacgcaagaaggaggttatgtggctggagtgtgaggggctggggagttgcagaaggtgaggtcgcaggggtgcctggggtaggagggaagtcagatcatgtagggtctttgaaaaacgtgttgcctgtactccacccatttccccttagcacttgccttcaggtgcacacagaccctatggcttcctactgctcctgtagctctctgcctgagggtctttgttggtgaggagtgcaacagctcctcatgcgtggggcaggccaggaagtcaatgcccccttagctctctactattgtggagatggcaaataaacacccaggtgtcttgccttttgcgtctgacaatggggaggtctgctctaggctctctcaggggcctccagtggggttagagtgcaacggcatgatcttggctcactgcaacccctgcctcccaggtataaatgagtctcctgcctcagcctcccaagtagctgggattacaggcatgcgccaccatgtctggctaatttctgtatttttagtaaagatggggtttcaccatgttggccaggctggtcccaaactcctgacctcaggtgatccgtctgcctcggcctcccaaagtgctgggattagaggcgtgagctaccatgccctgcctcatttgttactttttaagggccagggtcttgctctgttgcccaggctggggtgcagtggtagatcatagcacactgtaaagctaaactcctggcctcaagcgatcctcccacctcagcttccctagcagctagaactgcaggcacatgccacaatgcctgggtaattttttatatttatttatttatttatttatttatttatttatttatttatttattgagacctagtcttgctctgttgcccaggctagaatacagtggcacgatctcagctcactgcaacctccacctcccgggttcaaacgattctcgtgtctcagcttctcaagtagctgggattacagatgtgcaccaccacacccggctaatttttgtatttttagtagagatggagttttgccatctctactcattgaccaggctcatctcaaactcctgacctcaagtgatctgtcagcctctgcctcccaaagtgctgggattacaggcatgagccattgtgcctggccaatttttatttttgcagaggtggaggtgcctttctatgttgcccaggctggtctcaaactcctggcctcaagtggtcctcccacttcagcctcccaaagcgctgggattacaggcatgagctgccgtgcccagacaagtagctcccttactagccttccctctcttggcttccttccttgccctgtcttacttccctctctctcttcctatataccaggaatcacctcccagtgaatgctgcgttcaaggtcttgtctcggcatcagcttctggagcatcccaatctaaaacactgccatgaaccgtgattgggacttgggcttctatttttatttttattttgagacggagtctcgctctgtctcccaggctggagtgcagtggcatgatctcggctcactgcaacctctgcctcccgggttcaactgattctcctgcctcagcctccccagtagctgggactacaggcacatgccagcatgcctggctaattacttgtatttttagtagagatggagtttcaccgtgttagccaggatggtctggaactcctggcctcccaaagcgctgggattacaggcgtgagccactgcgccaggccaggacttgggcttttcctgagcttgagagcagtggccactgcccagtggtgagcagaggagggaaatagactgaagggggctggggaggagcagggaaaccagttggatgcgaccatgatccttcagagcgagctgaaggtggcctggagcagggtgagagacgtgggagtagggagaggcagttccatcctgggtacacttggaaggaggagccaacataacttgatgcctgcttagatgtgaaatgtgggaggcagtgaggtgtctagggtggctacaagggggttggcctgagcaaaggaaggatggagttgccttttgctgggatgagaagattgatggtgttgggcagatggggcaggctgttgagatgcctgttaagcacaggactgacaaagctgggctgggagacaggcaggtacttgggaactcaggagggagtccaggctgcaggtgtacgttggagggtcctcacaagttagacagcattcaaagccaagactggataaggtctccaaggcagtaagtgtcaaaagagaagagactggctgggcgcggtggctcacgcctataatcccagcactttgggaggatgaggcgggcagatgtcttgaggtcaggagttcgagaccagcctgaccaacatggtgaaaccctgtctctactaaaaatgcaaaaattagcttgccatggtggcgggcacctgtaatcccagctacgtaagaggctgaggcaggagaatctcttgaacctaggaggcggaggctgcagtgagccgagatcgtaccagtgcactccagcctgagcagcacagcaagactccatctcaaaacacacacacacacacacacacacacacacacattaaaaaaaaaaaaaaagaagaggtttccaggatgagccccgggcactcggtgtttggaagctgggagagggaagaagggtgcagcagagggtttggagaaggagtgaccgcagggtgggaggaaagagagaacaggagagaaatggaagcaagaatggaccacacttgatggaaaattatctgataaaatatttttaattaattttggtgtattttgaaacaatcacaaatttaccaaaaaaatttgcaaggacagtacaaaactgttttgtttggttttaccatgaacaaaagtatttatttagaatgagaaaagtcacaacataatacaaatttaaaataccacaaaatggccaggcatggtggctcatgcctgtaatcccagcactttgggaggccaaggcaggaggattgttgagcccaggagttcaagaccagcctgggcaacgtagcaaaatttagctagaaatggtggtgcatgcctgtagtcccagctattctggaggccaagtagggaagatcccttgagcccagaaggtcaaggctgcagtgaattgttgatcatgccactgcactctagcctaggtgacacagcaggactctagctctaaaaaataaaataataaaatactatgaacatcacaaaattcagaacaataccatattagtatttcattcctatattattaatcaactggctgatgtaacacgcttcctacataatttagctgtctaccctgatcacttcttcaaatagcaacaataatatatgtttttatagagagaatagaaaagcaattttgcatttcctctagagtgattgatccaaaattgtgattttttattatcaatattggaggaagcaaaacttcttttttttttctttttttgagatggagtctcgctctgtcacccatgctggtctcaaactcctgggctcaagcaagcctcctgccttggcctcctaaagtgctaagactacaggcgtgagccactgcacccagcccaatactattttttgatgaaccatttcatattgttactgacatgatgccccttcacccccaaaatagcttgtgttttctacaaacaaggatattcccctccgtaaccacatacagtcatcaataccaggaaaccacacaactgcattactaacacctgctcttccgacccatacagattttaccaattgccctggtatcatccttagtagcaaagcatccagcccaggatcaacacatttagcagtcacatctcttcagttcctgggtctttccctgactttcatgaccttgacacttttgatgattacaagccacttattttgtagaatgtccctcaatttgggctgggctgatattttctaatgataaggtcatattatgtgacccagcaattccattcttagatacatacaaaataactgaaaacaggtgctgaaacaaatttttttctttttgaggccgagttttactctgtcccccaggctggagtgcagtggcacgatctcagctgactgcaacctcctcctcctgggttcaagcgattctcatgcctcagcctcccgagtagctgggattacaagtgtacatcactgtgcctggctaatttttgtattattagtagaaacaggttttcaccatgttggccaggctggtctagaactcctgacttcaagtgatctgcctacctcagcctcccaaagtgctgggattataggtgtgagccaccgcacctggcctcaaatacttccacacaaatgttcattgcagcgttattcaccatagccaaaaggtggaacaacccaaatccccatcaaaagatgaatggataaacaacataaggtatatccacacaatggaatatttaattcagctatgaaaagagatgaagcgctaatacatgctacaacatgggcaaacttcaaaaacattgtgtggccaagtgcggtgactcacacctgtaatccgagcactttgggaggccgaggcgggtggatcacctaaggttgggagttcgagaccagtctggccaacacggcgaaaccccgtctctactaaaaatacaaaaattagccaggcgtggtggtgggtgcctgtaatcccagctacttgggaggctgaggcaggagaatcgcctgaacccgggaggcagaggttgccgtgagtcaagatcaggccactatactccagcctaggtgacagagcgagactctgtctcaaaaaaaaaaacaaaaataaaaataagcctggatcagaatacaaagttcttctggattttaaaactaaaacttgagttctggttctggaacaagatggtacttttccttgctcctccctttggtataaaggctcactcccatgtgctaccttacatctggtaaaacctggagggcctcgagtggcctaactgcaactttccctcctcactctgctctcagtgatagggtcctctagccaaacagccctcctcatcagggacactaggagcagttcttgtttgtccctgagtattgggttttggtccctgttagcccatggaattgtgtaaaaggaccagtcacaacctcccttggaaaccatggagcaccccactctcttgatactgcaaagcctgcctcccacagaccctggctgctccttctgtccccaacacccatgtgaccctgtggggcgtgtggtgctctctgcccccaggccatgagtatatgtgactattcactgttgatgtcatctgtccagtctcaccagttgtatgtttgaccatccccacaaccccagggcaggaattcctctcctcccccaccaagggggtgaggaggaggcaattaaaacactcccctctaaacagaactaaatatcctgggaattatttaacagacagcaataaaaatgacttaaagctgcaaagagaaaggtgagctagctatggaaaaataatgcagtgagttccctgaaactttttttttctttttctttttttgagacagggtctcactctgttacccaagcaggagtgcagtggtgtgatctaggctcaccgcaacctccacctcctgggctcaagcaatcgattctcctgcctcagcctccagagtagctgagattacaggcacatgccaccatacccggctaatttctttttatttttagtagagacggggtttcaccttgttggccagactggtctcgaaccccaacctcaagtgacccacctgcctcagcctctcaaagtactgaaattacaggcgtgagccaccatgcttggccgtgtcttcttcttttaatcttccatataccctagaccaggtgctgaagattcccacaacctagaaattccattaagcacttaaaaaaaaaaagataacaaaatcttgctctctctggacaaatggacaaagaataacttaaggaaaacccgaaagacgcctagtggggagtcccatgccccctccacagcggaagcactggcaggcagcctgacccacctgcaatcacagcctgcaggggcagcgtcagcttagctctgtgtctacctgccctccatgcagtggcataagaagacccaggccctctaaaccatttagcagaagaatgtagcccgcaaacaccaagcagctcagggaagtgccttctgccttaaacgatgacatcgacagagatggggcagggctagaagtagccccagcagtgctagaagaatcaagcagttccaaatcacattgaaagtgttctgatgggccgggcgtggtggctcacgcctgtaatcccagcactttgggaggctgaggtgggtggatcacctgaggtcgggagttcaagaccagcctgaccaacatggagaaaccccgtctctactaaaaatacaaaattagccaggcgtggtgctgcatgactgtaatcccagctacttgggaggctgaggcaggaggatcgcttgaacctgggagacagagattgcagtgagctgagattgcgtcattgcactccagcctgggcaacaagagtgaaactccatctaaaaaaaaaaaaaaaaaaccagaaagaaagtgttctgatgatgaccaaactgtccctggaactaatgcctacaaatatatgtcagaacctatatactaaagctaaatagagtgactgcctgctaaaacatattaaaaaacaattttttaaaaaaggcagacttgttctgtcatcaggctgcagtgcagtggtgcaatcacagcccactgcagcctcaacccccttagctcaagtaatcctcctgcctcagcctcccgagtagctgagaccacaggtgcacaccaccatgcttggctaatttttgtcatattattatttgtagagacagggtctcgctatgttgcccaggttggtctcaaactcctgggctcaagtaatcctcccacctcagcctcccaaagttctgggattataggtgtgagacaacgcatgcagccctaaaacagatttaaataggatcaagcgtgtgctaacataatatccagtgtccagaatacaattgcaaaacactcatcatcccaaagaaccacagttcgaatgagaaaagacaaactgcctccaaaacccagataaatcagatgttgaaattacctgacaagaattttaaagcagcctcataaaaatgcctcaacaaacacttataatgaaaaaaacacttataataaaaaaaatgtttaaaattctcggcaaagaaagagcagtaatttaaacaaagaaccaaatggatcttataaaactgaaaaatacaataactgaaatttttaaaaatgtactagatggactcaatagtataaaggagatgacacaagatagaaacgataaacttgcaacagatcaataggatgtactccaactaaacaacagaaagaaaacagactgaaaaaaggaaaaagagcttcagtgttctgtggggcagtaacaaaagatataatgtttttgtatataatccaaatcccagaatgagaaaagagagtgtggactaaaaaagtattaaaagaaatacgaaaagaaatccaccccaagatatatcataatcaaattctgaaaactaaaaacaaagacaaaaatcttaaaactagccaggcaaacaatgtgttccctataaatgaatatcaattcaaatgataatgaatttcccaccggaaaccacggaggccagaaagaagtggcccaactttttttttttttttttttttttgagacagggtctcactttgtcacccaggctggagtgcagttgtgcaatcttgcttactgcagcctctgccttctgggatcaagtgatcctccgacctcagcctcccaagtagctgggactacaggtgcacgccaccaggctttgctaattttttaaggtttttatggagacagggtctaacaatattgcccaggctggtctcgaactcctgggctcaggagatcctcctgccttggcctcccaaagtcctgggattacaggcatgagccactgtgcctggccagcccaacattttttaactgctgaaagaaaagaacctcccactgcaaatcctctatccagtgaaatcatccttcaggaataaagggaaaataaagtcatttgcacacaaaggaaaactaagagaattgttgttagtggatctatccttagaggaagctccctaaacagaaagaagatggtaacagaaggaggttggaacatttaagtcttatgttagaaaaaaggaaaaaatctcaaatcaatcatttaagcttccttctcaataacgtagaaaaagaagagcaaattaatcccaaagcaagtagaaggaaggaaacaataaacacaagagcagaaatcaacaaaattaaaaaaacaatagagaaaattaaaccaaaatctggctcttcataaagatcaacaaaatatataaaactcttgcaagattgacagagagaaaaagggagaagacacacatcatcaatatcaagactgaaacggatgatattgcaatcgatcctgcagccattaaatagatactaatgggatactataaataactttacactcataaattcaacaacttagaagaaataaggttattcctcaaaaaccacaaaactgggccaagatgaaatagataacctgaattattctataactgttaaagaaattgaatttataattataaaactcctgaaaaaggaatctctatgaccagaatgtttcattagagacttgtaccaaacattcaaaaatgaatgtttcaaaagattcatgaacatcaattttgcacaatgtctttcagaaagcagaagaggagtgaacacttccaaactcattttattgaggccagaattaccctgataccaaattttgacaaaaaagaaaactacaaggctgggagcggttgctcacacctgtaatcgcagcattgtgggaggctgaggtgggcggatcacctgaggtagggagtttgagactagcctggccaacatggtgaaaccctgtgtctacaaaaaatacaaaaatcagccaggtgtggtgccttgtgcctgtaaccccagctactcaggaggctgaggcaggagaattgcttgagcccaggaggcagaggttgcagtgagccgagatcataccaccacactccagcctgggcaacagagcgagactctgtctcaaaagagaaaaaaaaagaaaactacggactaatatgtcttatgaacttagagacattctcgacaaaattttagcaattgaattcaacaatgtataaaaagaataatacacaacaaccaagtggaattttttacaggtatgcaaggttggttcactattcaaaaatcaatcaatgtcatccaccagataaataggctaaagaagaaaatcatatgattatgtcaactgatgcatttgacaaagcatttgaaaaattcagcacccattcatgataacaactcttggtacgctaggaattgaaggacacttcttcaacctcataaagggcatctacaaaaaacctaaagcttacatcatacttcatagcaaaagactgcatggtttcccctatggtcagaaacaagataagaatgttcactcttatcatttttattgaacataatattggaagttctagccactgcaataaggcaaggaaaagaaagaagcatacaaattggaatggaaaaaagtaaaactgtctctgtttgcagatgacatgttgtctacaaggaaaatcccaaggaatctacaaaaaactcctagaactaattaaaaagttcagtgagttcagtaaggttgcaggatacaagattaacatacaaaatcaattgcatttctatatactgacagcaaacaagtggaaatcaaaataaaaaacacaataccacttaaaactgctccaaagaaaatcaaatccttagctgtaaacctaacaaaacatgtatagaatctgtatgatgaaaattacaaaatggtaatgaaagaaataaaagaaaacctaaatagttggagagacatactaaattcatggatcaaaagacttaacatagtaaaaatgtcaagtctctctaaatgatctataggtttaatgcaattcttaccaaattctcagcaagaattttgtagacataacaagcttatgctaaaatttaggccgggcacgatggctcatgcctgtaattccagcactttgggaggccgaggcaggcagatcacttgaggtcaggagtttgagaccagcctggccaacatggcgaaaccccgtctctactaaaaatacaaaaattagctgggcatggtggtgcatgcctgtagtcccagctactcgggaggctgaggcaggagaattgtttgaacccaggaagtagaggttgtggtaagccgagatcgcaccactgaactccagcctggatgctgcagtgagactttgtctcaaaaaaataaataaataaaataaaataataaaatttataggaaaagatacaagacctagcttggccaaagcaattttgaaaaaagaaaaaaagggatatggtggaaggaaacactctactggtgttaagattttaagattttactacatagctacagtgagtaagacaatgtggtactgcctagggatagacatatggatcagtggaacagaatagggaatacagaggtagattcacataaagatgcctaacagttgacaaaggagcaaaaggaatttaatggaggagaaatacacttttcactaaatctgctggagcaattggacattcataggcagaaaaatgaaactcaacttgtctcacacctcatacaaaaattaaaaatggatcatggactaaaatgtaaaatgtaaacttatcaaacatctaggagaaaatataagaggaggcggggcacggtggctcacgcctgtaatcccagcactttgggagggtgaggtgggcggatcacttgaggtcaggagttcaagaccagcctggccaacatggcgaaacccgtctctactaaaaatacaaaaaattagctaggcatggtggcaggtgcctgtaatcccagctacttgtgaggctgaggcaagagaattgcctggacccaggaggcagaggttgcagtgagccaagatcatgccactgcactctagcctgggtgacagagggagactgtcaaaacatatatatatatatatatatgtttccatatatatatatatatatatgtttccatatatatatatatatatgtttccatatatatatatatatatgtttccatatatgtatatatggaaatgttcagaatctaagattgagtattatctataaaaacatgatccataaaaggaaaatttgataaaccagaccttattaacattaaaatgaaaaacttttgctttgcataagactaaggatgaagaggcaaaacagagactaagagatactatttgcaaatcacgtatgtgaccaaggactagtatctagactgtaaaaaacccctcagaattcaatagtaaaaaatgaaacaaaactctcaaacaatccaaattagaaaataggcataaaatctgcacagacattttgctaaagaggatatacagatggcaaataaagatgctcaacatcattagctggtagagaaatgcaaattaaaacttatcgagatactacagcactcctatcagaatggctaaaataaaaaagtagtgataacaccaaatgctggtaggcgtgtagaaaaactggatcacttatacattgctgatgggagcatgtaaaatagttctgccactctgaaaaatggtttggcagttcctttgaaaactaaaagtgaacttatcgtatgacccagcaattatactcttgggcattttttttccagataaatgaaaacttatttttatgtagaagcgtgtatataaatgttcatagatgctttattcataatagctccaacttgaaaactacccaaatatccttcagtgggtgatggttaaacaagctgtgatagattcataccatagagtgctactggcaataaaaaggaatgatctactgatacacacaacaacatgaatgaacctgcagaaaattatgttgaaaaaagccagtctcaaaagaataatactgcatgaatctgcttgtataacatttgtaaaataatataaagactgagaatagattcctcgttgccaggggttagggttgagggaggatggggaagaaggaaggggtatttgtataaaagggcagtactaggaatcttgtaatagcacagttaagtttgtttgttcgttcgtttgtttgtttgtttgttttgagacagaaccttggtctgtcgcccaggctggagcgtggtgacgtgatcccagctcactgcaacttccgcttcccaggttcaagcaattcacctgcctcagcctatgaagtggctgggattacaggcacccaccaccatgtctgggtagtttttatattttagtagagatagggtttcaccacgttggccaggctggtcttgaactcctgacctcaagtgatccacccacctcggccacccaaagtgctgggattacaggtgtgagccgccatgcccagccattaaatatcttgattggggtgatggtcacacaaagctacatatgtgacaaaattgcatagagctacctgcacgcacacatgcatgcacacgcacaaaggcatggataatcagtaaaatctaaataaactgttcatggcaccaatgtccatttcctagtgttgatattgtactatagttatataagatgttaccatagcagggaattgggtgaagtgtacacaggacatccctgtacatttatttgcaatttcctgtgaatctataactatttcaaaataagcagttttgaaaaataaagcttgaggcccagcagtggtggctcacacctgtaatcccagcaccttaggaggctgaggtgggcggatcacctgaggttgggagttcaagaccagcctgaccaacatggagaaaccccgtctctactaattatacaaaattagccgggcatggtggcacatgcctgtaatcccagctactcgggaggctgaggcaggagaatcgcttgaacctgggaggcggaggttgcagtgaaccgagatcgcaccattgcaccccagcctgggcaagaagagcgaaactccatctcaaataaataaataaagtttgagactttgagcccatggaggacttcactttggactctgggaggccgtctctgtgctctgctacccctctggaacaggatgtcagttttattatatgtccttacacagtgcccgactcctatggggtgctcaatgaatatttgcccaacaagaatggtaaggaataaggacattgggactccttagggagaagtgggagcccaggacgcccagctccccagcctgtgttggccttaatgtgtgtctataccaggggtcacctaaataagctctaggtatggaagagagcttgcattattccagcaatgggtacatgaaatgacaccaagctggagttcgtttattccttcagtatcttcagtaaaggcaggaggtgaaaggaccttacagctaaggtgcaggggatgtggaggggccattccccatctttctgtagggcacattgaatagaggttgttttggttgttgaagtgctttagaaaccaagtgggggcaaaaacacaagtgtgtcaggaggcgtgggtaagagaggggcattcagagttaggtgggcaggtgaggaggcagggaggtagagacggtggagtctgtcccagcatggccacgagagaagccacagccctggcaggtggggctgttcacacctctgagccacaggcacagccccaggtggggcagccctcatgcctccagtccccatcccctaagcctcagggcttacgccttgtctatgggtggcagggaagtattttctgcattctctctgttctctttcttcctcacaatggcatcacctcctgttctctcttctctcacttacataacacgagctccattatctcacaatagatgtgagtagatactgaggaggtaggagtagaaggtcttgaggtagggggtgggtttcaactccagaggtgtggctcagatgctggaccagattgaggactagctaaaacagggatgaggtggaagcagctttccataagacacgcccaccagtgcgccatgtcagtttatcattgccatggcaacacctggaagataccccctgccttttcatggcaatgacacagcgacccaaaagttactacctctttcctagaaatttcagcataaaacaccccttaatctgcatgcagataagagtgggtataaatctgactgcaaaactgctctgagctgctactctctgcctatggggttgccctgctctcaggagcagtgacagagctgcaacagggatggagctgcaacactgctgcttcaggaaagcgttttcttctacctctggcttgcctttgttttatttgttttgttttgttttgttttgttttgttttgtttttatttagacagagtctcgctctgtcgcacaggctggagtgcagtgacgcaatctcggttcactgcaaccttcgcctcccaggttcaagcaattctcctgcctcagcctcccgagtagctgggagtacaggcacctgctaccacacctagctaatttttgtatttttagtagagacgaggcttcaccatgttggccaggctcgtctcgaactcctgacctcaggctatacgcctgccttggcctcccaaagtgctgggattacaggtgtaagtcacggcacccagcctctggcttgcctttgaattatttcctgggcaaagccaagagccctaatgggctaagctccagtttggggcttgcctgtcctgcgtcaatctgaatggacatttcgcatgggcccagcacacagtgcctcccaaactataaatcagacctgttctgaggatcctgtgctctcatctcagttcttggcacccaatgtgggcctgtctctggctaagaacagtgactaggagcatgtcaccaccctccccgcccacaatgactgtttcagagatggaagtgttacccaggcagctccagagggaactttactgtgtgcatgggatctcccgcttctgctggagctgacagctactttctcacctctaggaaagaccaagaaggaaacagacgcccaggagagacaaacagagctgagggctggggcaggagactgggccctccagctacccctgaaacagcctgcttcaagacctctgagcttttcagtttatgtgagcaaatatgtttccttcattggcttatgccagtttgaactgggttttctctcccttgcaatacagagtcctcactgtattgaatgtggaggggccattccccatctttatatagggcacactgaatagaggctgttttggttgtggaagtgcattagaaaccaggtgagggcaaaaacacatgtgtcaggaggtgtgggtaagagaggggcatttagagttaggtgggcaggagaggaggcagggaggtagggacagtgggggtgataaaatgatgatctatactcacattgtcacaggcctaacatgtggattttcagcatcacatctgctgtttaacatgatagggaaaactccccatcactatgagaaactaggaaatggcatgagactagcccatgattcctgcaaagggaaatctcatctgaggagccgatggatagcagagtctagcagaatgatgctaagacctcagaacttcaggggctggggatgagggtgagctatagggcagttattaaaacctctaagaagtatattggactctggaacccccaaatttaggatttgggatgacccccacagtggtccaacagagatgtgcaagaaagagtaaaatttgtaaagaatctaattcatattcacaattttcagaggtaattgcatctaaaacatgagagcaaaaaaaaaaaatacacgaaaatggaacaatctagggacagaaatgttctcggagatgaaaaagttgatcactgaattttcatatgcaagagagcttgaatgtcaaataaaaaaataaaatgcaaaagaggcaggaggcagtgaacaacagactcgataatgaaaaaagaaaactgaggcagtgaattagaacacaggatcaaaaaattctcccagggaaaacccgagacatataaaagactaaataatacatatgaagtttgactgaaggtagctctcagctagacaaagcagaatcactggaaaagaaatgatggtcaaaaaaccaatatagagccttcaatcccagcaccatggtgggctgagctaacagaaccccctgctcaccacacacatacagaaacatttggtaaaatataataatacagactgggtatcccttatctgaaatgcttaagaccagaaatgttttgaatttcagttttttttttttcagactttggaatgtttgcattgtgcttattggttcagcatccctaatccaaaaatctgaaatctagaatgcttcattgagtattttctttgagtgtcatgtcaacactcaaaaagtttggagcattttgaatttcagatgtttagattaaggatactcagtctgtagttaataataattaataaagcatttttaaatgcatggcagctgggcatggtggctcagacctgtaatcccaggattttgggaggctgaggcaggtggattgctggagcctgggagttcgagaccagcctgggcaacatggcaaaaccccatctctacaaaaaatagaaaaagttagctaggcatggtagcatgtgcctgtggtcccagctacttgggaggctgaggtgggaggatttcttgagcccaggaggtcgaggctgcagtgagctgtgattgcaccattgcactccagcctgggagacagagtgagaccctgtctaaaaaaaaaaaaaaaaaaaagcatggcggatcatgaaagaacaaaagaaatttaaatccctgagtaccagaactggagcaacaactcaaggccagagaagtgagttcatggcagaagctgaagcagctgtgagcctatcagactagatgcagagccagggccagggctggggggtaacatctgccgaaataaaggacaaggacacagacaaccccaggtggggagctggaaccacagtatgtgtgtaaagctggggctctggaaaggctgttccctaatgtgagaagaaactagagaaataccactggagggagacaacaagaacgtctgtctttgcctggacctctagatggttaaaaaaaaaaagaaaagaaaagaaaaacaaacaaaagaacaaaccccccacaacctctcatgagaaaataaaaaccaagaatatatatgtgtaggtactggatccaaattaatactacgcacattatataagccccaaggtaaggagattcaaaacctagcccacagtagtgaaacttctggactttcttggcattaaaatgcatagttcaggccgggagtggtggctcacgcctgtaatcccagcactttaggaggctgaggcaggaggatcacttgaggtcaggagttcaagaccagcctggccaacatgatgaaaccctgtctccactaaagtacagaagaattagctgggcatggtggtgtgcacctgtaatcccagctactcaggaggttgaggcacgagaattgcttcaacctgggaggaggaggttgcagtgagctgagatcgcacaactgcactctagtctgagcaacagagggagacttattctcaaaaaaaaaaaaaaaagcatagttctgttctgtggcaacactgctgtaacttcaagtacacagagcttgattccatagacaaagacaatctccactgaagatgagctcacagctctaaaatgtacatgtgtgaagaaataattcatcttgaaggagagtcagcagactcaacatacaaaggagtatcaccccgagaattcaagacaaaagaacaaattaaaagggaccaaaataatgctgcaaaagaacaatttgaaagggctccaagggtgtaagacgataagagataaaaggactgggaattataatgaagtaattagagtctacaagaaaaaaaccccagcaagtttgaaaaagataataattttattttattttttattttttttatttttttttgagaggaagtctcactctgtcacccaggctggagtgcagtggtacaattttggctcactgtaacctccaccttgcaggttcaaacaattctcctgcctcagcctcccgagtagctgggattacaggaacgtgccaccacgctcaattttttatgtttagtagagacgggtttttgccatgttggccagtttggtctcaaacttctgatctcaggcaatctgcccgcctcagcctcccaaagtgttgggattacaggcgtgagccactgctccaggccaaagagcataattttaaacatacaaaattagcaaacttgaagacatggcaacagaaaacatagaagagaagcaaagtgaagaagaaagataaaagactttaacaaatgaacagtctcagtgacatatgagacaatatgaaatagtctaaaataggtaaaaaaggagatacacaatgaagtggggcagatttttcccaagaaataaaggtccaagatttcccagagttgatgaaatatttacactcatagatcaaagaatgttgacatcccaaagcaggataatcacaaagaaatcgtaattaaatggttgaaaacaggtaataaagagaaacttaaaagcagttatatgaaaatattttaaaggcacattacatacagggcttacaaagataagagttaatgctgacttgtcagaaacaatgcaatcaaaaagataatgaaatagcatcttcaggtgttaaaagaaaaaaaagatcacctttgctggatatagaattactggttgactttttttttccttttagcacttgagaaaatatgtcactaacgatcttcacctcaaggaatagcaaagaaagttcttcaggctgaaggaatatgacaccttggatcaaatcaaataaggaaacttggatcaaatcaaataaagggccagtcgtggtggctcatgcctgtaatcccagcactttgggaagctgaggtggaagcatcacctgaggtcaagtgtttgataccagcctggccaacatggtgaaacccggtctctactgaaaacaaaaattagccgggcgtggtagcaggcgcctgtagtcccagctactcgggaggctgaggcaggaaaatttcttgagcctgggaggcggaggttgcagtgagccgagatgacaccactgcactccaggctgggcaacagagcgagactctgccctgctgccccacccctactcccccaaaataaaaatcaaataagggaagggaggtggaaatggtagataggtaaataaatttaagccttttcttttttttaactttaaaaatatatttgattatttaaagaaaaacagtaaaactgcattttgaggtttagaacatatgcaaaagtaaactatatggtggcaagtatacagagagcaggaggtaaatagagtatactattgcacagttattatactatacatgaagtaatataatgttacttggaggcagactatggtaagttaaagatgcataaagtaaaccttagagcatgactaaaagtaaaatgaaaaagtattgctaatcagccaacatagaagtggaataaagaaaaaaaaatgtatctaaaagaaggcagaaaagaggagcaaaagaaccatgaaaatggaacaaaaagaaaataaacaagacagtgcaccaacactcaaccatatcaataattaatttaaatgtaaatggtctaaatgccaaaaggtggaaattgtcaaactggataaaaaagtaagaggaaatcatatgctgtttaagaaacactttaaggtagagcacaatggctcatgcctataatcccagcacattgggaggccaaggcaggaggattgcttgagcccaagcagtttgagacaagcctgagcaacatagtgggaccccatgtttacaaaaagatgtctaaaattagctaggtatagtggcacacgcctgtaatcctagccactcgggaggctgaggaagaaggatcacttgagcccaggaggttgagcctgcattgagccatgattgtgcccctgcactccagcccacagagcacgactctgtctcaagaaaagaaaaataaataaataaataaaaataaaaacactttaaataaaaaacagataaatgcgaaaaaaggaaaaatagatatcatataaatacttataagaaaactgaagtagctatattaaaatgttacaatgtagacatcaggatagagtattattggaaataaacaagagcattctataatgatgaaaggctcaattcatcaagaagacattaaaaacctaaaattttatgcacttaataacagagatgcaaaatgtgcaaagcaaataataacataattaaaaagcagaaacagatacaattacaatcatggttggagatttccagaatcctctttattaattgatcaaataagtagacagaatatcagtaagaatatagaagacgtgaacaattttttttttcttttttgagatggagtctcactctgtcacccaggctggagtgcagtggcacaatcttggctcactgcaacctccacctcccaggtttgaccaattctcctgccttagcctctccagtaactgggactacaggtgcacgttgccacactcagctaatttttgtatttttagtaaagacagggtttcagcatgttggccaggctggtctcgaactcctgacctcaggtgatccgcccgcctctgtctcccaaagtgctggggtgacaggcatgagccaccgtgctgagccgaagacatgaacaatattatcggctaacttgtcataactgacacttacagaacactacacttaataatggtgaaatacacatttttttcaagtgcacatggaccatttgctaaatagattgtatactgtactataaacaagtctcaatacatttaaaaggattgaaataatagagtatgttttctaaccataaaatgttaacttaaaaatcaataagatagctattaaatccccaaatatttagaagttaaacaatacagtcttaaataatctatgagtcaagaagaaatcagtcagaaaattagaaaatatcttgaactgagtaaatggaactgcaacacactaatttattagtacacagttaaagtggagttgagagcaccaaaacagtgcttaaaggaaaacttaaaaacatttagaaaagaagaaaagtctcaagtcaccgtcaccagtggggcctgatctaagctgatctaagcttccatcataagaagctagaaaaagaagagcaaattaaacccaaaagaagtagaaggaaataggccgggcatggtggctcatgcctgtaatcccaacgttttgggaggctgaggtggggggatcacgaggtcaagagatcgagaccatcctggccaacatggtgaaaccccatctctactaaaaacacaaaaattagctgggtgtggtggtgcaggcctgaagtctcagctactcgggtggctgaagcaggagaatcgcttcaacccaggaggcggaggttgcagtgagctgagattgcacgactgcactctagcctggcaacagagcaagactccgtctaaaaaaaaagaaaaaaaaaatgaaggaaatagtataaatcagggtggaaatcaatgaaattgaaaatgtacaaataatagagacaatcaaagaaagaaaaccctggttatttgaaaagatcaataaaattataaacatctaattaaaatgatcacaaaaaagaatgaagacacaaatgaccaacatcaggtatgaaagagaagtcagcactaaagatcctatagacattaaaagaataataaagaaatattataaacaaatgtatgcaaataaattgataaacagatgaatggacaagcttcttgaaagatacaaagtatcaaaactgactcagaaagatggttgactggatgcatctggtattcgtctcttccatggagaggaatcaaaatagcccacagataatcacactttggatagatcatctaagagagaacaccgaattcaacagagtagcactgaaagcaagggaggagaaagaaatgaggcagcttattcagctgagattggctagaagtctggagcagctgtctaatgcagggaaaggtaagtgaaagaccctagatccacattcctgctgtggactcctataatcctagccaagggagagcccctcgacccttgcaggccccaagatgagcatagggagctgcctagagactatgcaaaggtataaatccagaaagataactcatgctgggtcccgccaactcctgagtcttgagcagctgcagtatggcaccgttttgagagcacaggccccaccagactaagtcctgccctggcactgtactgaggcaggggccacaggcagcaatcccacccccctacccccagcagagggacgactgcacatcttcatgcaccccaaggacaaattccactgcttacaccactgccactgagggctgccgggggccaaggcatgagtgtgagcaaagcctgtacactgccccacagctgcctgcctatggctgctgccagggaatccaacctcatcctcccctgtagcaaggccacagggcagcagctgatgtcccgacctgagctttccatgagcatcctggggatcagcccacctctgcctaccacagccagagattgcatgcagcactagggggcctgaggacaggtccgccatggcctgtcttcaccaaccttaaagtatccaagcatgccatccagggacctggggatcacctgtgcacactgtccagggccctggggattgcccagcctaatccatcactggtggcacctgagcactccccctggggtctgaggtcatgttcactcaagctcccactactgccacagttggtactcatctgcatgtgccatctgtgggtctggggaccagcctgcccaacctgtcacagccattaccaactccagtgtggactgcttgggtcccggagggttgtctcaccacactgctacctccattgctcaggggctcaagagcctgcccacgcatctgactgctgccgttcctggcacccaagaaagccagcaggaggcccaagaatcagcctactaacacaagtaccagtgtatgccaccctgaggcccaaggacaggcatgttcagcccattgctgttaccactggggactgaagactggcccatttagcaccccagccctcaacaaaatttcaccacagcctccattaacaaccacaccctaagccactaaagaaattgcagacaccactggcaacgtctacagccaaagaaatcatacagagactacactaccgtacacacccagaatttaaactgaagtgccctacctaccaacaccatagatacctcttaaggaaaaagtcctccctgatgaaagcaaattcaaaaaaataaaaaggaagaagcaattgttacaccagatgtgcacatatcaatgtacggacacaagaaaaatgaaaaatgaatatgacacctccaaaggaatacaagaaatctctagcaacagatctcaaaaataaattaatgaaatcccagagaaagaattcaaaatattgatactaaagaagttcaatgagaaaagagaattctgaaaaacaacacaaatcagaaaaacaattcaggatatgaatgagaaatttaccaaaaaaccaagcagaaaaaagaaccaagcagaaattcaggaactgaataatttattcaatgaaatacaagatatatttgaaaacttcaacaatagactagatcaagcagaaaaagaatcttaaaatttggctgggttaggtggctcatgcctataatcccagcactttgggaggccgaagtgggcagatcatctgaggtcaggagttcaagaccagcctggtcaacatggtgaaatcccatctctactaaaaatacaaaattagctgggtatggtggtgcatgcctgtaatcccagttacttgggaggctgaggcaggagaatcgcttgaacccaggaggcagaggttgcagtgagctgagattgcgccattgcattccagcctgggcgacaagagcaaatctctgttaaaaaaaaaaaaaaaaaaaaaagaggaaagaaagaaagaaagagagagagagaaagaatcttagaatttgaagatgggtcttttgaaataacccagtcagataaaaataaagaaaaaaaagaatgagccaaaccttcatgacatgtgggacactataaagtgagaaaatattcaaatttttgatatctcaaaaggtgaaggaaaaatgaaagggttagaaaccctatttaatgaaataatagatgaaaatttcccaagactagcaagagatttagacatccagatacacaaggctcgaagatccccaaatagatacaattcaaaatagtcaaactgttgagagtcaaaaacaaagagaaaattctaaaaacagcatgagaaagtatctagtcacctagaaaggaaccccaatcagacttacagcggatttcttaggggaaaacttacaggccaggagagaatgggatgatatattttaagtgatggaggaaaaaaacaaaaaaaaacaacaaaaaaaccctgccagcccaggatactctacccagcaaaattttccttcacaaatgaaggagaaataaaatctttcccagacaagcaaaagctggggaattcatcactgttagaccagtcctacaagaaatgcataagggagtcctatacctggaagtaaaagatcaatactagcatcatgaaaatacacaaaaatatgaaaaccattggaagagcaaacacacaaacaagaaagagaaaaaaacctcaattgttatgactgtagaataccacaaaaccatagtgataaacaaaaagagagaaagaaaagaacaaagcgtatagaaaacaagcagaaatcaagtaatagaatgacaagaataagcccttacatatcattaataaccttgaatataaatgaattaaattttggccaggtgtggtggctcacacctgtaatcccagcactttgggaggctgagaggagtggatcacctgaggtcaggagtttgagaccagcttggccaacatggtgaaaccctgtctctactaaaaatacaaaaaaattagccaggtatggtggccagcacctgtaatcccagctatttgggaggttgaggcaggagaattgcttgaacctggaaggcggagattgcagtgagccaagatagagccattgcactccagcctgggcaacagagagagacttcatctcccaaaaaagtataataacaataaaataaaaaataaataaataaataaacatggcttaaatttccactcatatagactggctgaatggataaaaaaaaaacatgacctaactatatgctgcctacaagactgaaaacaaaggaatggaagaagatattttatgcaaatagaaaccaaaagtgagcaggagtagctatacttatataagtcagactttgtgtcaaaaatagtataaaagagacaaaaaaggtcaccatataatgaaaaagagatcaattcagcaagaggatataacaattctaaacatatatgcacccaacactggagcacctagatatataaagcaaatattattagatctaaagggagtgatagactccaacacagaaatagttggagacttcaacaccctattctcagcattagactgatcatctagatagaaaattaagaaaaaaaattggatttaaactgcacattagaccaaatggacataacagaaatttatagaacatttcatccaacagctgcagaatacacagtcttctcatcagtacacgaaacattctccaggatagaccatatgttagaacacaaaacaagtctcaataaatttttaaagattaaaattatatcaagtatcttctcagatcacaatgaaataaaactagaaatcaataacaagagaaactttgaaaactgtacaaatacatggaaattaaatgacatactcttgaatgaccattgggtcaagaaagaaataaagaggagatttaaaaaatttatgaaataaatgaaaatcaaaacagaacatatcaaaacctttgagatatagcaaaaacagtgctaagagagaattttatagcaataaatgcctacatcaaaaagtagagaaatttaaaataaataatttaatgatgtacttcaaggaactagaaaatcaagaacaaaccaaacccagaattaacagaagaaaataaataataaaaatcagagcagaactaaatgaaatagagacttaaaaattacaaaggataaataaatgaaaagttggttttttgaaaagataaacaaaattgataaaccacttgctagactaaacaggaaaaaaagagagaaggcccaagtaaacaaaataaaaaataaaaaaggagacattacaactcatactacagaaatacaaaagatcgtgagagactatgatgaacgtctacacactaacaaactagaaaacctagagtaaatggataaatccaggacacgtactacctaccaagatggaatcaggaagcaacagaaaacctgaacaggccaataatgagtaatgagattgaatcaataattaaaagtccaagacaggatggcttcactgccaaattctaccaagattccaaagaaggactaatatcaattctcctcaaactaatcaaaaaaattgaagagtaaggaattctccctactcattctatgagaccaaaattaccttgataccaaaaccagacaaagacacaacaacaaaagaaaactacaggccaatatccctgatgaacacgattgcaaaaattctgaacaaaatactagcaaaccaaatccagcagcacatgaaaaaaaaaaaaatagggccgggtgcagtggctcatgcctgtaatctcagcactttgggaggctgaggtgggaggatcacctgaggtcaggagttcaagaccagcctggccaagatggtgaaacccccccatctctactaaaaatacaaaaattagctgggcgtggtagcgggcccctgtaatcccagctactcgggaggctgaggcagaatcgcttgaatccaggaggcagaggttgcagtaagctgagatcgcaccattgcactccagcctgggtgacagagtgacactctatcttaaacaaacaaacaaacaaaaaaatacaccatgaaaaattagccgggcatggtagtaggcacctgtagtcccagctacttggcaggctgaggcaggagaatcgcttgaaccggggaggcggaggttgcagtgagctgagattgcgtcactgaactccagtctgggtgacagagctagacttcgtcttaaaaaacaaaaacaaaaacaaaacgaaaacaaacaaacaaaaaacaccatgatcaagtggaactttgaaaactatgcaaatacatgaaaattaatcccagggatgcaaggatcattcaacatacacaaatcaaaaaatgtgatacatcatatcaacagaatgagggacaaaaaaacccatatgatcatctcaatagatacagaaaaagcatttgataaaaacactcaataaactaagtatagaaggaatatagctcaatataataaaggccatatatgacaaaaccacagctaacatcataatgaatggagaaaaggtaaaagcctttcccctaagaactgaaacaacacaaggatgccttttttcaccactcctattcaacatagtactggaagtcctagccagagtaatcagacaagagaaagaaacagaaggcatccaaattggaaaataagaagtcaaattgttgatctttccatatgtatatataaacagggtcttgctctttcacccaggctggagtgcagtggtgcgatcttggctcactgaatcctccgcccccaggctcaagcgatccttccgcctcagccccctgagatatatatctctctatataaatataaatataaatatatatatatatatatatatatatatatatatagttttgaacaacatggcaagaccccatcgctaccaaaaatacaaaatattagccaggcatggtggtgtgtgcctgtggtctcagctactcagggggctgaggtgggaggatcacgcccggccaggttacttgatttttgacacaggtgctaaggttatttagcatcaagaaaatgaaagtcttcatagaaaatagtcccagacacttggacatccataggcaaaagtgaacctcaacctttatgtctcaccttacacaaaaattaacttgaaatagagtagtagacttaaatgcaaaatacaacattaagaaacttctataagtgaatagaggagacaatctttgtgagcttgggataggcaaagatgtcttaaacaagacataaaagcactaatcttaaaggaaaaacttgacaatttttttccttcatcaaaataaaaaaaactgctttctgaaaggcactttaaaaataaagtcttgaagtcaggatttaagaccggcatgggcaacatggtaagactctgtctctactaaaaatgcaaaaaattacccaggcatggtggtgcatgtctgtcatcccagctacttggggggggtgaggtgagagaattgtttgagccttggagggtggaggttgcagtgaggagccaggatcacaccactgcactccagcctgcgtgacagagagaggccctgtctaaataaataaataaataaagtcaagacaaagggtataagacaatattgtcaatacacagctcttacagaaagacttgtataatatcttacaaaagattcaataagaagaagacaactgaattttaaaatggacgaaagatttgaacagacatttcacgggctaagaagcacatgaaaaatgctccacatgattagtcattaggaaaatattaattaaaactacaataagatatcaataagcatccctactaaaatgggctaaaacgaaaaagacagatattctgagctctggtggaggagctagagctcgaatccctggctggaggaagtgtaaaatcgctcagctcctttgcaaacagtttagcagttgttataatattaaacgtacactcgataaagaaaatgtgatatatatataccatggaacgctactcagccataaaaaggaatgaaataatggcattggcagcaacctggatggaattggagaccgttattctaagtgaaataactccggaatggaaaaccaaacattgtatgttcttactcataagtgggagctaagctatgaggatgcaaaggcataaaaatgatacaatggacttttgggactcagaggaaagggtagtgggtgagggataaaatactatacattaaatacagtgtacactgctcgggtgatgggtgcaccaaaatctcagaaatcaccacgaaagaacttatgcatgtaaccaaacaccacctgttccccacaaaacctattgaaataaaaaaataaaaataaagttgaacaggagaaaaaaaaaatacactcatcacatgacccagagattccacacttagatatttacccaagagaaagaaaaacatatacccataccgagacttgtacacaaatgttcatagcagctttactcataaaaaccaaaaactggaaacaatccaaacgacagataagtgaaaacacaaattgtggtgtatccatacaacagaacactattcagcacaaaagaggataaactgctggtatgtgcaatggcatggctgattctcaaaagcataagtgatctctcaaaatgatgcctcagccagcagaggtggctcatgcctgtaatcccagcactttgggaggccggggtgggcggatcacttgaggccaggagttcgagaccagcctggccaacttggcaaaaaccccatctctactaaaaaaacaaaaaacaaacaaaaaaaatgagccaggcatggtggtgcatacctgtaatcttagctactcgggaggctgaggcaggagaattacttgaacccaggaagcagaggttgcagtgagctgagatcacaatactgcactccagcctgggcaacagaacaagactccatctcaaaaatcaaaaaaacaaaacaaaatgatgcctcaaaagtatgatgctgggtgcagcaaaccaccgtggcaaaccatgtaggtaaacatggtacaggtttaccatgtaacaaacctgcacatgtaccctagaactaaaaaaaaaaaaaaaaaaagcagcatgatgccgggcaaaagaagccagatacaagagtatgtgctgtactattctgttgatatgaaatagaaatagtgacaaaaagcagattggtcactgcctagagcaggggctaggaaggcaggttatctactaggcaggagcaggaaagcagctataggtgtggaaacgttctatgtcttttttgggtggagggtggttacatggttgtatacatttgtcaaaatgcatgggtgcattttattttgtaaaaattatgcctcaataagttggaattaaagaaaaaagaaagaaaaaatatttttatgccattgggggtagagaaagttctttttgaataagatataaaaactataaaccacaaaagacaaagagaattctactacattaaaatttacaacttctgcatatcagaagacaccaacctcaatattaaaaaacaacccacaggctgggcacggtggctcacacctataatctcagcactttgggagatcaaggcaggtggatcacctgaggtcagaagttcaagaccaccctggccaacatggtgaaaccccatctctactaaaaatacaaaaattagccaggcgtggttggtgggcacctgtaatcccagctactccggaggctgagacaggagaattgcttgtacctgggaggcgacagagcgaggctttgtcttaaaaaacaaaaacaacaacaacaacaaaaaaaactccgacagactgggagaggatatttacaacccatgtaacaacaacaacaaaagattggtatccagaatattttataaactattatgaagcaatcagaaaaatacaatctaatgaaaaatggctgggatatcactgggcaaatcataagtgaaaaaatcaaatcatccacaagcatgtgagaagatgtcaactcactctcaaccaggaaaatagaaattagaaatggcaaaatgtgatcgtcagataacagactgtgggcagggatgtggggaaatgggatccgttttgtgttcctaatggtagtgtatcttcagagaacaaattgatgaggaatttggcaagagctagggaatttgaagatgcacatccccacatcacctgacatttcttcatttagctatctgccctgcaatgctcaaggttatgtgcaccaggttaggtgctcaacatgtgttgagcactgccttgtttttttgcctttactttgttttttgacacggatctcgttctgtcgcgcagggctacagtgcagtggcgtgatcacggctcactgcagtcttgacctcctgggctcagtgatcctcccacctcagcatcctgagtagctgggactacaggcatgctccaccatgcctggatattttttgtagagacggggtctcatggtgttgcccaggcttgcattgttagccccgaagtgggaatatcctaaatttctaataattgagcaataggtaaaaaaaaaaaaaaaaaaagtatagctatgcaatggaatactatcgaagaatcaaaatgaataaactagatctagatctatatgtatgaacacggtgagatatatatatatatatatatatatatatatatatatatatatatatatatgagagagagccgtatagcaagagagggaatgcgctacagaaggatatataccgcccagaaagagaggtgctcagcaggaccctaagaaagggttcccactgcagccccataaaagggggcagtgttggagcaagtggacagctgaaaactgcctgcaaataaggagtttcccagactctggggtgtctctacagagacccaatccccggctctctgacagcgatgcaggtcttttgaacgcctgggctgctgctgcccgcgcgcctcccccgtggcaataagctatgaacaggcgctcgcaagcgctgcgatcccacaccacctgcgcggtgcagaatgcgagatgagcgagcccacagggcctccagctctgtgccgcatcacagcctcccctgcgtctttcttctctgctaccatcccactcactttggctccacagacttgctttgaggtttggcacttccacatttttaatataaactcagattctgaagactccagcatcaaatccttattttaaaaaaaaaaaaaaagaccccccaaagaaactgacttcctaactttccacctgcccattgttttctaaagaacaggtgtttgagtagcttgtaggtcgtaaccttttatcccaaaaaagaaatctattttctccttcccatgcactctaacctcaacaaacccaaatcagtttggagatggagccctgcttgattttattttatttagagagagggtctcgctctatcacccagactggagtgcagtggcacgatcacagctcactgaagcctccaactcctgggctcaagtgatcctcccaccttggcctcccaagaagctgggactacaggtgtgcaccaccatggctaatttctttattttttgtagagagggggttttgctgtgttgcccaggctagtctctaacactcagcctcaaacgatcttcctgccttgcttggcctcccaaggccttgggattgtaggaacagccaccatgcctggccatgacttctgatctcccttctgagatttggttgtaggaaggtgggggatggatggatgtgtccgaggtctgcctctaaccacatttctttctttttctttttttctttttagatgcagtcttgctctgtttgcccaggctggagtgcagtggcgtgatcttggctcactgcaacccctcaagcgattctcctgcctcagcctcccaagtagctgggattataggtgcccgccaccacacccggctaatttttttgtatttttagtagagatggggtttcaccatattggccaggctggtcttgaactcccgagctcaagtgatctgcccaccttggcctcccaaagtgttgggattacaggcttgagccactgcacccggcctcttaccgtatttctatctgagcctgcctttgcttgtcttcggtgggggaattgagaatccattggtatctgagctggagaggatcaacaaagctgtatgaagcccccttggtacagatcagagaaacctgctgagaaaagagaaccacttccctgccttcccttggaagcccaagtgtttcctgtgcctttcatatccgccctcaaggctggcccatgtggactgcatcaatgtctcccttgcctctgacttttagttggatctggctcctgggattctctggcccaagacgggaatgagagacgatagggaggaaggccctttattccctccagggccaccctccttgaaggtcacagcccagaggggctatcacatggcctttggttttttccccatcccacccacaaccagatttttgtgacagtatccggagagtgaaataaacctgcattgccattttctcagcaatttccgtctcccactccctcttctctaccaatgcactcacagcatctatgtgcagtgccttccacattctagacgctggaaggatgctgccgggagagggttggatgtagtccctgacttcgaagagatgttggtgtgtccagaagagggaggtgcaggcacagagctgccagtgccaacatgagggcagaacttctgaccatctgaccatctaaaaggcagcctctcgggctttcctgtatctctttactagataatctttactaacctttaatagagtaaagattaaatgacaaaggtggccaggagcaatggctcacacctgtaatcctagcactttgggtggccaaggtgggcggatcacttgaggtcaggagttcgagaccagcctggtcaacatggtgaaattccgtctctactgaaaatacagaaattagccggaaatcacttgaaccattggggggggggggtgcagacattgcagtgacctgagattgtgccattgcactccagcctaggcaacagggcgagactccatctcaaaaaaaaaaaaaaaaaaaggccaggcacagtggctcacatctgtaatcccagcactttgggaggctgaggcgggtggatcacctgaggtcaggagttcgagacaagcctggccaacatgctgaaaccccatctctactaaaaatgcaaaaactagctgggtgtggtggtgcacccctgtaatcccagctagtggggaggctgggatgggagaattgcttgaacctgggaggcggaggctgcagtgagctgagatcgtgccactgcactccagcctgggcaacagagcaagaccctatctcaaaacaaacaaaaagattaaacaagaaagatgatcgataataacttggcatttataagtaccatcagtcactcaagattttccaagcacttttcacaggggaggcctgtgctaagtactccagcactgagggcaggtgtacaaggcagggtaccactccttttctgcccttccttgaagagtgcagtcttttgggggaatcaggtgagtgagtggtcaacgtggctgagggatttctggtgagacagcggccagtgggccctggagtgagtgaggaagttcttggaacagcagggatttcactaatgctctcctcctacgtggaaggggctcattgagtccaagtccccaaaaatgcttacagaacaaagtggtttaaaaaaatctaaatcacaactgctggactcttatgtcatctagtgactaaccagttcctgaccaggtatttgaactgctgggaagttgccatcttgaatggatgcctggcagcagccatatcagttttcccaggggaccttgcgagcagctccacacacaggacctgggagtgggcccggggggatggattcaggtcgctttgtaggacagcatgcccagctcttccttcctactaacaatagcaaaacccctcatcaccctcatcacaagccaatctgccaacaagtgttcattcaatagctgctgtctctgcccctgctgttaccccagctgtggtggtcagtggggaggagtgagctgtttgctgagaagaggtgagatggcgagtaatagtagtaataataataacaataataataaagacagtgggccaggcgaggtggctcactcctgtaatcccagcactttgggaggccaaggtgggaggatcacttgagcccaggagttcaataccagcctaggcaacaaaatgagaccctgtctctgaaaacaaataaaaaggtaacgtatcttctaaaattatcttttctagactttgtgtaagactgaaaaaaatgaagccaagcccacaatggctcacacctgtaaccccagcacattgggaggctgaggcaggaggactgcttgagcccaggagttcaagaccagcctgggcaacatagcaagaccccctctctccaataaataaataaattagctgggtgtggttgcatgcatctatagtcccagctacttgggaggccgaggctggaggatcactggaggccaggagttggaggctgcagtgagctctgattgcaccactacactccagcctgggcgacagagtgagaccctgtctctaaaaattaaaaaaagaaaaaagagagagaatgcacaacaaatgttatctgtgtcctaggccagctgagggcttcccatgaatcttctcactaagtccttgctggagccctttgaaggaggcatcagcatcctcaattacagatgaggagactaacagggaaacagcatgtgacctgtccagtgattcaaaagtgccttctccaccgtggtgccagactgacctccgagaagacactgaccagaaggcatagcaaggttgacagctgacgggtgcagctggaggccaggcaggctggagcaggggcctggagaggggatgtggagtggcagggagagcctctgctgaggccttcctgggctaggccagggggtcagggctgcagggggagggtggagagggggaagaggtgggggtggagagagcccaggaggggagcctggcctgcagtggtgcttcaggcagaagcggccctcccaccagcccctttccagtcacataaagctgggtttgtttccatttatctgcttgacttttcagccaagatgctgtttgaaaaacatattgctctaatttaatccacatgtgcacccccaggacagagtctaaagaaagcttccgtcacggccccaaagtctcagcctcatggaggtggtaggggtgggccttgtgggtgaccccaacccacctttaagggcccaccctaaagccagggcccaccctacttctgtcctggacaagcgggtgggggtgttggtgggacaggggactcccaaggtagtgtccatggcccgctccctgcacctgcccacaggggaaggatgcaaagagcaggaggccagtggacacagtgggcatgggcttggggtagggttggtgcatgagggggtttgactttttttttttttttgcaatggagtctcactcagtctgtcgcccaggctgaagtgcagtggcatgatcttggctcactgcaacctccatctcccaggttcaaacaattctcctgcctcagcctcccaagtagccagcactacaggtgtccgccaccatgcctggataatttttttttttttttgagacagagtctcgctctgtccccaggttggagggcagtggcgcaatctcggctcactgcaacctccaccttctgggttcaagtgattctcctgcctcagcctcccgagtggctgaggtacaggtgcatgccatcatacctggctaaatttttgtatttttagtagagataaggtttcaccatattggccaggctggtcttgaactcctgatctcaagtgatccacccacctcagcctcccagtgttaggattacaggtgtaagccacagcgcctgacccagctacctttttttttttttttttttggtatttttagtgaagacagggtattgccatgttggccaggctggtctcaaacccctgacctcaagtgatctgcccaccatggcctcccagagtgttgggatgacaggtgtgagccaccacacctggtcaagggggctttgacttctaatcagttcctttccctcccttcctcagatacagacccaaactctggggcacacagtggtgacataaggcagtttatccaagcatgtggagttgggggagatgctgtctacagggtggaagccaggatgagccaggagcagggctctgagatggggcacaggaccacctacgatctcgcctgagcgcctggctgcatatgaggtgagtttaggaagcttgtctcacagccacaccccactggcaagaagccagcagggagcaaaaccagtatgttcatttcagtattctctcccaagtgtgtgcctgtcacatatcttattttgaatcaaattatgtatattatttggagggattgattgctgaaaatgagaaaagctagaaggacctgtctcacacaggtttattcagaactgagaccagagatacagcactggagcatagaactgaaatgtctgactttgattcagggcctaggacccttctggtgtcctacgagtcaggatcctggtgcactggtccatgcagaaatgacacttctctttccttctagagtcattccctccactccacaactcattgtccgcttggactaggctggattcccaagcaaagaacaatgcaggaggattgcttgagcccaggaattcagaaccagcctgagcaacatagtgagattctgtatctacaaaaaatttttaaaaattagccaggcatggtggtgcacacctgtactcccaactactcaggaggctgaggcaggaggatcacttgagcccaggagttgaaggctgcagtgagctatgatcacaccagcctgggcaacagaatgagaccctgtctttgaaaattaaaaacagaagaaaaaaaatgataatgcacaacgaatgttatctgtgtcctaggcaccatgctaagggcttcccataaattgtctcgtccttgcccgagccctgtggaagaggtgccgacatccctcccatcttacaggagaggaaactgacagtgaaacagcacttgacctgcgtggcgactctgtaacgtatcctctctgctgcggtgctggacggacttaagagaagatgctggccagagggcaccttagaactcctggtttgttctagcccatttttgtgtcgctaaaaaggaagacctgagacctgggtaactgataaagaaaagaggtttatttgcctcacagatctgcaggctgtacaagaagcatggcatcagcacctgcttctggtggggcctcaggaagcttccactcatggcagaaggaaaaagggagctgtgtgtcacatggcaagagagggagcaagagagaggggagagaggtgccaggctcttttaaacagccagatctcgcaggaactcagagcgagaattcactcattcaccaagccattcatgaggaatccatccccatgacccaaacacctcccatcaggcccccactccaacactggggatcacatttcaacatgaggtttggaggggacacacacccaaaccatatcacctgatatttgtagaaatcaatgcctggggcagctccagagtgtctatataagcagcgtacatctgggaccctcagagactccatgcccccttgtgacttctaagaattgaattcaggccaggctcagtggctcacatctgtaatcccagcagttcgggaggctgaggcgagcagatcacttgaggtcaggagttcgaaaacagcctgaccaacatggtgaaaccctgtctctactaaaaatacaaaaaaaagtcaggcatggttggtgcatgcctgcaatcacaactactgaggcatgagaatcacttgaacccaggaggtggatgcagtgagctgagatcacaccactgcactccagcctgggtgacagagtgagactccgtttcaaaaaaaaagaattgagaccccctctgctgggaaggaccaggagcagccctcagagcccatctgggtggcatctcaaaagatgctgctggaaagaaggaatctgggcagattatggggtttctgaaatgcactaatgtatttctatcagaaatggcaaagaagttgaaaatagtatctgagaaggtcagaatggaatgagtttccattgctgcctgctaaccagagaatagctcttgttcatgtctgtgactgggcaggattctcggggctgcctctgccaaaggccgagtatgggggtctctggggtcttacctggaaagctttggaatttcccaggctgcaagatactcccctttgtctcaagacaagagctcagctgtgcagccaggatgcagccatcaggagcttccttgatgctgggaagggcttgggagaccctcctggggcatggccggctccacagatgggcaaaggcagggaggacgtcctgcatttttcaaagatggacatccatgccaggtctgagtggttctggtcctatgggggtatctcctggccaaacctttggtgaaccccacctgagaagccaacaggcacttgcatggcagagacacttagtgagaacccagggtcggcgagcaggcaggcaacagagggctggaacactaggtccacaaatatcagtcctgtgcttgcgggtacctccagaggaggaggccaaagtgaaggcctaggactccacagctcctgctgtggagggagggcaggatgggagttgaaggtagggaggcgcccagatacacaggtccagtagcagatgctggccactacacacaggctccagggaggaaatctggccaacacaacagtagagcacctcttctgtaacctctgcactttgggaagccgaagcatgagaattgcttgaggccaggagtttaagaccagcctgggcaacatagtgagacccccatctctacaaaacatattttttttttttttttttgagacagagtttcactttgtcgctcaggctggagtgaagtggtgcaatcttggctcactgcaacctctgcctcccagattcaagcgattcttgtccctcagcctctccagtagctgggattacaggcatgtgccaccaggcccaactaattttttgtatttttagtagatatgaggttttgccatgttgccccggttggtcttgaactccagagctcaggcaatctgcccattgcagcctcccaaagtgctaggattacaggtgtgagctaccgagcccagccaaaacataaaaaatttaaaacagtttaaaaaaaaagttaaaaaggtttttgttttgttttgttttgttttgtttttttaaagtaaagcacctctttaattgggctgggcatacattttggtttatgagattggtcttttcaacttccagtgaccaattaagatgaaactgcctttcaccattcactcagttgataatggcagcacaaacatgtactaggtccctggctcacatggccaagggtcacaacggctgcccatgttctcctgatggaaacttttttatggctttacaaagatttgatgtgattcttttttccgtgaaggactggggctctcgacacaacgctatacagtaacgctgtaatcttggggcttaatcaaaacatattccaacaacctattctggtgccacgaatgaatgtttattttaaacaatttgctacggcttttttttttttaagagagagaaagaagggaatttcttgaagccaaatttctccctgcccttaagcttgtctctccactcgaaagactgtgtcagacgcccaagtcgtaattaaccacagagctgtttgggagaaagggagaccgagggggtatttgacaaagaattaacagatgtcatttcggcggcggctggcccactgctgctgggccatttgttggatggaagctgattcggctgctgtcgtaaacagagagtagtaataattatatccaggctgcattaagcatagcagattggatgtataacattctgttaaaaaccagctcctctcctgtttctctcgagacacaatggagacgacccccagtccccagttttgaaagccgtctccaaggatcctgacagactttccaatagggaaataggtcatgttctttcgtggctaattctgctgaggttcctgggatggcaaagggatctgctgaaaagcgagttccaggcacacttcagtaaaccagccacaccgcacaccgcagagctgcctttttccatttgaaaaatgaaagaattaaattcaaaacaaacaacttcaatttaacaccaaactacaggataaccaatcttaaaaatgtcacagcgtaatggatcttaatacccatagaaaacacaaaaacaacaccattgttccccagcaaatgcagagcaacctcgcagaatttcagtgaaggagaaagaagggaaaaacaccttattacttccaacccctgcgagccattttggtctccaaaggttttaggctgcctgaggccgtgtgtctgcagtgtttcgggaaatgacttgccttagcacgaacgctgctctgttctgcagcgacgctgcctgcccgggagcggtgccgctccatttctggttaactcttccttcccgggcctgccgctcgcaggagcagtgtgggcagggcccagggacgccactgcaacccagcttcctgcagggcagccggactggcacctctaggagcagcttctccaagaaagtggcttcagcagaacagccagctacccccaccgctctggagaatctgttctcaaaccaagctataaagcgactgtcatcaaaaggcacaacacagctgaaaccaggggacagaatcggggccttgtgggccaatactggccgatccagcctctcagggtgccctgctggggacagcttcccatctctgccacaaaaccaggaaggacactcttctggttagcagggtacaagcggagtccagccggatactagggcacaacttgggcctgaggacatggggtgagggaagcacagggacagaaacgttttcgccacatatctgagctgaaagatgacagagaaccacttagcacttaagaggttaatacaattcctaagtgttcagcaatcatggcaatttagtgccatttcgattattacacaataaacagaccatgttgtctggaagcaaatttttatgagtatagctgaaggggctgcaacttatttagctgtggaaactcgaagggaaagagacttccaaatgctaacaccacggagcagaaacacaggtagcaaagaaaggttattctcaggtcaccgccctggcaagtcaccaccatgaccttcaaaatgagtatatccttagagggaaatcaagttcaccaaagggttctttacacagaaccatttgactgataatattgttgagtttcagcgcaaaagatttgggaatttccagaaacatgttatgttcggcaaaaaaaaacatgatgttaacatgggatggggaatgtatacagggttttggccacttggaatatgcattgaatacaaacacctgcaagacagctcattcatagacacaggtcgctgctgtagcttataggtacttgggtacgatgatcacaaacctgatcaaattcctaatacaacaagaaaatcaaatatgtaaacagaattgtgggagatgctgtaactctcaaaggttctgcaaaattttatggcacactgagctccaagagacacatttttcctttaaggcacacaaaggtttggatttggggaggaggacagccttgccccagctccaccaatggaggaaggaaatcaccccagaggtacttcaagactcaaggttaaaatgtgcatgtgtgcatctatacctttatgtttgtgcatttttaggcttgcacaaggcactcacattcatgaggtgtctggaacaaccaagctgccctctgctgaacaaagcaaagaggttgttatttttacccccattttacagatgagctaactgaggttccacttaggaacctagggccccttcctggggggaattggatagtcttgtagttagcctttgtgcacaaactgcagacccaaagaggttggaggactttctcctcaagggtccctgggacacatggagctggctgtgggtggcagtggagtggagggtgggggcaagataaagctgcaaagacgcaccctgcttccagggtgtgaagagtaatcctgctttgggtagaattgggtgggggctgtgagagcatagcctctgcctggtggcatccacctacccacccatccacctacccatccatccatctactcaatcatccatccatctatccatccatccatccatccacccatccatccacatacccacccatctacctacctacccacacattcacccatccatccatccacccacccatccatccacatacccacccatctacctacctacccacacattcacccatccatccatccacccacccatccatccacatacccacccatctacctacccacccacccattcacccatccatccatccacccatcctcaacctcatgttgaggagggctgggctggatcctggggctgccatggctaatgcagacagcaaaaacgtctcagctgccaagatcaagtaagactttctaccccatctccaatataccagcctgcctaactcctgaaagcttacctgtagaaaagcaatgatctcaaacagtggaatgcacaagagttaactggggtgcctattgaaaatgtacatttctgattcagtaggtctgcggtgctggggcagagctcatggactcaaatgaatagggaactcaggtgattctctctctctctctctctttttattttttttattttggagacagagtcttgctctgtcacccaggctaaagtgcagtggcatgatctcggctcactacagcctctacctcccaggttcaagcaattatctttgcctcagcctcctaagtagctgggattacaggtgcccaccaccacacctggctaatttttgtatttttagtaaagacaaggtttcgccatgttggccaggctggtctcaaactcctgacctcaggttatccgcctgcctcagcctcccagagtgttaggattacagacgtgagccactgtgcccagcttcaactcaggtgattctcaaaacaggtagtcagaagagcacaccttgagaaaccttgattttgggtcacatttctctgtgcaaagtagtcttcttaggtctttcaaaaatgctatgttcctcggaggtgcagcatatttagttcttaacaggaatttataagatactggtgaccaccctccagtctgttcatccatccacccacccatccacccattcttcctcccacccacctacccacccatctacctatccatccgtccattcgtctatccacctacccacccacccatccatccacccattcacatatccacccacccattcacccactgtatcagtccattcttatgctgcaatgaagaaatacctgagactgggtaatttaaaaagaaaagagatttaattgactcacagttctgcttggctgggaaggcctcaggaaacttacaatcatggcgggaggggaagcaaatatgtccttctttacaaggcagcaggagagaaaactgccaagcaagcaggggaaaaacccttataaaaccatcagatcccgtgagaactcactcactatcacaagaacagcatgggggtaaccgcccccatgattcaattgcctcccattgggtccctcccatgacaggtggggattatgggaactacaattcaaaatgagatttgggtggggacacagcaaaactatattgcccacctacccacctgcccacccatccacccatttacctgtccactcattcactgctctatttatccatccacctacccacccatccatccacccattcacccacctacccacccacccatccatccactcatttgcccatccagtcattccactgaaccacccactcacccatccactcacctacccatccatccacctacccatccatccacctacccacccatccacctactcatccatccatccatccatccatccatccacccacccatccatccatccacccacccacccatccatccactcatttgcccatccacccatccactcaaccacccactcacccatccattcacctacccatccatccacctacccacccatccacctactcatccatccatccatccatccatccgtccatccatccacccacccatccatccatccacccatccacccatccacccacccatccatccatccttccatccatccacccacccatccatccatccacccatccacccatccacccacccatccacccatttatcctcctacccatttatccattcatccatgcttctgtgcaacagatctttcctggacactgattccatgaaaagccatgttctaggtgccggaatggtagaagaggtcccagcaggcagatgaaggggcagaccctaaagggagctggtgactcagagaggggacaccactgtgggatgcccagaggtagatggcttcatcacagtggtacacactcctggccatagccttagggtcccacaagcagatgtgacggatggcttacagcacattttgggccctgagggcacgaatcatctgaaagggccaaattcttttcccctcagaaagaaaaatataactcatgactgctacatggtgagaaagaggaagaggtctggacatgaaggaagaacagaaatagaaggagaatgacaatggcagccacaaagagcatgcagataaaaacacctgaggcttctttagagacccaggcaaggcctattgagagcccagagccaccgggcttagagcttttgtgtccccatgctcagtcttgatttggaattctcttggaaacattgtttataattggccattcagaacaaccttagtgcttataaagctgtcacccatgtggtccagtctcaggtcagtgtctcagacaaagaacctgaatccatcagcttaaatgtaatttcaaagtcagacaagttcaatcctgccatttctcaaacactctgaaggagatacaagatcacaagtgctgcatcttaaacctgtcccttctctcctgcctcttgtctggaaggctgcagttgctggtcttttcaacactccgcagcactcttcccaggtctctccctcttgaccctgaccttccctccctcccctttgtttccaatcctgctgcacacaaaccccaaaagggctggccttgttggccaaggagggtagtgactgggtgagtgtgagccccttggacttcttatctgaaaagtggagactatactatgacctcatgggtttgtgatccattaaatgaaagaatataaataaaacatttagcctgtaatcccaacactttgggaggctgaggagagaggatggtttaagcccaggagtttgagaccagcctgggcaacatggcgaaaccatatctctaccaaaaatacaaaaattagctgggtatggtggcatgtgcctgtagtcccaactacttgggaggctgaggtgggaggatggcttgagcccaggagaaggaggttgcagtgagctgagatcatgccattgcactcaagcctgggttacagaaccagaccccgtctcaaaaaaaaaaaaagaaaaagaaaaaagaaaagaaattaatgaaggcatcaggcatcagtacatggtagacaattaatgaatatcactgttctcacgggaaaacctaaaatagggaggaaatcacagattttattatttcagaatttattatttcatatgggatgattctatatcttacaaaaataaatgtataacttttggagaatgtttgtctaatttacggcaaggagaagtggagtgtaaagttagtattatgcaacattttccccagataattcccgtattgatattctaatgaaaataggctccccaaattctgcatttttatcgtgtgtgtctatgctagcatttatgttatattctgaattaacaaacttcaaacgctaaaaaattacatatgcagaaaaatagggaaaagggatatgcatcttttgtaagtctcagtggagcgcaggcaaacctctagccctatctgatactcctagcttaaaccacatggtagttttggaatgggagaacattaatgactacaaaacaataagaaggctgtttagacatgtgcaaaaaaaaaaaaaaaaaaggaaatctttaaaatcaggctgtgtctttatcattgaatgcctactaatgaatatcattctcaataaagaaacttctggctctctcatgttctgtttgttaaaatagcatccaagacattttctataacgcaaacttaatgcaaacccaaaacaaaataaaaaggaaagaatgtcaaaagaacaaacttttaaaactctgcactttttttttattattagatgctattcctgacttgttaaaattgatcaaatagaaagctgtgaaaagagaaaaaattaagccaactagaaaagtgtgacttggatttaatattttataattgccaagggacatactgagatcaatgaatttttgcctgaaatgaacgtcagaaagagatgtacttcagtcttttagggaacattggtctatttaattcttgtgtctgatgcatgtgaaataggcctgcctcggccttctttctctgccgggggtgttgctggcagcggacattaccacttttaataggccgctgtctgaggagtggcaagggagcccataacccatcgactctaatggatcagcctgtttattcacttacaccttttttttttcccagctaattttagttttgcatgctgagttgtttcgctttgaattaaatgaatagaaacaaagggaaaagcctgtgcagctaataaaccatgatgatgttcacggccctctcaacaggcttctccacatagcaggtatcccatctgagaacagattcactgtggcattttctccacttgttgacgaaattaacattttatacatgctcacattcagaggaaaaaaattaaattattcaaattgcttgatcgagaatgcaccgttgtttggagtagacctacgcgcccagcctcaggccaccgacatcctcagatttcagacaccggtcagtgactttttctgcctgggggggtcatcccacagctctccgtggggtcacacaaacaggaaaaatgccccagtgctttgctttgtctaatgaaaaaccagagagacacaaggaggctatgtcagcgtgcccttcaacagaaataacaggagtcagtggtttaaaaacatccccctcccaaactccctctctatgcccagagaacttgaagaaggttccagaaaccttttaggtcgatagctgccaaggggtatgagagagacaagaatgtccaatataagagagaggggaaaggggtcagcttccccttatcttctgaataggacccattttccatttggggtttggaattgtcacaaagaccccaatggcagaggagggggctgcacccgcctcttccccattgagaactcacaccgattccctgtggtccctgcaggttagaggggctaccatgtccccaccaccggtaaagcctaggaagggggctagtggcctgaactccagaaaaggcattctccacttgtgggagaaacaatattccccaaaagaccaccccaggaggtggagatgagaggatcgcttgaacccaggcattggaggctgcagtgagctgtgatcaccactgtgctccagcctgggcaacagagcaagacccagtctcgaaaaaaaaaaaagaaagaaagaaagaaaaagaaaaaaaagaaccactccaaaagattcaccctccaaacagttcaactccaaaggttactgccctaagggtggtgccatacggcatggctgtgttgtctcctggcaaaaaaaaaaaaaaaaaaaaattaaataaagttgttgctcaatcagaagctaagataacttgcaaagtgatctggaaaatattgagagaatttagactagctgggagaaatagaacatgctctgtcattaaatcaaataaaaataaaaataggtctctctgagtattaagcagaatgtcaacaactctctgaatgaaatctattttagacacaacaatagtatgataccctacttttgccctcatgcaattaaaatagggtaattttttagaccatttcttgcagctataatctgtcactaggagaagaaagcccttagcaccccagctgtatccagtttcacacatggcttttctttcctttctaccccacaaatctcaataaaccagaagtcagtcagctcaaactcctcagccctgcctttttaggactcacattccttagctgtgctttcttccctcaaaaccccaagtcacccaaatagcattttctccattcagcagcattttttttcttttcttttccttttttttttttttttctctgagacagagttttgctcttgttgcctgggctggagtgcaatggcatgatctcggctcactgcaacctctgcctcctgggttcaagcgattctcctgtctcagcctcctgagtagctggattacaggtgcatgccaccacacccgactagtatttgtatttttagtagagatgagttttcatcatattggtcaggctggtctcaaactcctgacctcaggtgatctacttgccttggcctcccaaagtgctgggattacaggtgtgagccaccgcacccgaccattcagcagcatttcttatacaaatatgcactgactcctaccatgtgcaaagcactgaacctgatgtttaatcattggcatggagctaagtaatgcacatttcttttttcttttcttttttttttcttttttttttttgagacagagtctcactctgtcacccaggctatagtgcagtggtgtgatcttgacacactgcaatctctacctcccagattcaagggattctcatgcctcagcctcctgagtagctgggattacaggcatgcaccaccacgccaggctagtttttgtatttttagtagaagtgagatttcactatgttggccaggatggtctcgaactcctggcctcaagcgatccacccaccttggccacccaaagtgctgggattagaggtgtaagccactgcgcctggccacacatttctatttgttaaagaatgaagaaatgtagtgggtagggtccctagcggaactccctgcacagtgtccttcaacccagagcctaacaggctctctctcatcaatacgcaagttacaataaaataattgatgggcccacaatgcatgcccacaggatggccgtgagcaagaaactctcaccgtgcaagaaaccatacagtcacagaataattctgcttcccctcgatttgtgtgcctggacccagatccccgctctcagacccagtgtgcaaagcagagagggaacaacagactcgagttggaagtgatttacttcattagctgggattacaagtttaacttacaaaccagaggtcaaaatttctcattaacaagggggccgtgaatcgctgcaggctttggttcaagaggagaccactcttattactaactacacatttcaatctgtctttgatgttctccttcttccctcctcccttttattttttggcagaggagctgattttaattgtggcactacaaccaggctccctccatcccagggagcagcctcccgtctgctgctgcctggcgagtgagtttgcaagattgggtgcagtctatcgctcagggcacattttaatggctcccctctcctacaaggcttggattgttttccacgtgattctggttaatttcgctgcgggaaagggcattggttttccttgtgagcttctgatcagtctgcctcagagaggtgaaatagattaaaacagagaaggaggcgttgtcattccaactttccggacgcgaggaccagacccagcacatctccagcactcagaatagagagaggagtttgacagagaccgttatgctacaaaaagcgctcttttgagaaatcagctttggttgtttacaaaatactcaggttgccttcaagtgccccttcccttcaaaaccaccaccaagggttaaaagaagcaactcaaacgagataaaacttctgcagggtgcacttatcctgagaatctcagaatcccacactgcagaatccttttccaaataagaagaccaggaaattgtagcagcagttatgtattattgtccagcacaaataaaagtgcttaacacgcactgttctaaagaccaagacccgcgtgcaggtcacagtggcacaatgaccaatgtcactgaaccagggcttcaaatggagtcactgatggaaaggattccactatctaattatttagaagtatagagtatagccattattgaaaataactaaattgttattccggtctagtctgggaagaaggtcacattcaaaccgcataagctctaaatattcctcagttgctattcatgcgctgtgaatgtttgttctccctgagaaatgttttcttagttgccgggtgaagagcccgtaggtagcacagaggctgtggatggggctcagtgcctagtgcccatcagagagcctactaagctgaccccattgcagagagtagaggcagcttccagcaaccgggctggcctgctcggctgcacgggactcccagcatgttccaggtgtggcagcttgctgtggaagccacggtgccagggggacaaaaactccttgtgcaggaccagcacagtggctcatgcctgtaatcccagcagtttgggaggctgaggccagaggatcccttgagcccagaagttcaagaccagcctgggaaacatagggggaccctgtctttacaaaaaataaaaaacaaacaaacaaaaaattgtccaggtgtggtggcgtgcacctgtagtcccagctactcaggaagctggagtgggaggattgcttgagcccagaaggtccaggaggttgaggctactatgagctgtgatcacaccactgccctccagcctgggtgacagagcaaggccctgtctcaaaacaaaacaaaacaaaacaaaaaacccaaaaccacaactcctcatgcaaaacaagcaggggtggctgcagtgtcctgcccagttcccatccggaacccccaggggaagcagggggcttctcatccatggagaaattactgccttctttgctttattttattattattattattttgctgctaatgtttagttttagttccttttatgtctccagttccctttaacaaaaacactgattagaactcaaggaatccatgtgacctggaggtgaagagcagttctcagctggggacaatcatcaggctcagacccaggaagcaccagtggctccgggtcacaggggcccgaggcaacccggccatctgggccctcagccacttcctggcgccacccgaggcaccccaggccaagccaggcagtcaccttgaccgggctgctggggcgtctcacccgcgcactgtccctccctgttcccaccccctccctggcaggcagctgttcagctccaacaggggcctatcttaacaacgagacattttagaaaggtccttattgctggtctaatttcaaacaggcaccacaatgaagaactgtctttgtatgggattaattttaaaacctcaggatttgatgtcagtgggaaaaacacagtgtgggggtcaaactgctgccttctcctccttctggccagcccaggggctcatttcttaggagatgaaaactctgacaagcccttcagtcaagctgaaagcaggcagcggtccagccacagccacaggcctcccgggcatcctgtgacccctccgaaaagtcacattcactttgctcttgagaaaggaaaaatcatgctggaggcattttatttgaaaccatgtgaaataaggaaatgtgaagatgtgaaaatgaagtgaaaaaaaagttagaattcatttccgtccttgcaatggcttagaagccgagctggttcattttgaaagcgtgtaaaaatctgatccattcaccagtaggcagagactacaaaatgcttaaggtaaaatatgtaaatatgtaaaattatctgttgaaaaccatctccttttgtgcttgaaagaattttttaaagcatctttatttctattctgcattaatatactattgagcagaaaagtttcttttggcaaaacaacaaaaaaccaagatgccagaaaatttagtgattctgaaatgaagtccatgggaacaaaggaaggacaaaaaggatttctatcttctcgtgcacttgtatggcactttttttgtgtgataatttaaagcatatcattaatataacaaattatagaattcattttttaaaagcattgttcacctgaaaacttgaagcgaacctcaccttcaggcctctgctactgtctcttttggaagtgggctccctcttctccccgggtgtcccctgcctcacctgacccagcccccgctatccttgatagatccagggacctcccagcagtgtgtttggacccataccacaaataattggtcacaaacagtttatcttatttctagatatttccaaattaatttttttgaaatatggaaaagaatggccggatatatgcctatagctatgtaattatcattcattcagttggatttgaatccattgtattgcaacaaacgtggtttcatcacacaacttgcaacttccagaaataggggggttagtggttgttgttttttcctttcccctaatccaatttcttctggagggggttcaaccaatgaatgttttgtctcataagccaacacctcgtaggtagattgctgtcatttcttgtctcctcctgagggagacctatcactgtggactgggcctccagccccactggccagggttggagggatgagcctcagattgggaaggggtgtgcctgaaaccaaatccactgagctctcaagccagatgaacaaaaccctcagatcctggaggggaagacagtgtctatacttggccctgtacgtatggcagcagcattgtttggggaaggtgaaggtgcttaaaactggaaaattgttcttggttttgcaaacccttgggtgttttctgaaagatcagacaatggaaagtagaaagctttctctaaaacaattttcaaatctgtttattctactagacaccctcgtattcctagcgcttgtttctacgttttcttttgtttaaatctcttattgtctcaaaaaggttatcaaaaaataaaaataaaaaaacgcatgtgcacacacacacacacacacacacacacacacacacacacaagattgtgtccagaagactttccaagggctgggagtggtagctcacacctgtaatcccagcactttgggaggcagaggcaggaggatcgtttgaagtcagcagtttgagaccagcttggcccacatggtgaaaccccgtctctactaaaaatacaaaaaaattagctgggcatggtgatgtgcacctgtaatctcagctactcaggaggctgaggcaggaaaatcatttgagcctgggaggcggaggttgcagtgagctgagatcacaccactgcactccagcctggctgacagagtaagactccgtctcaaaaaaaaaaaaaaaaaaaaaagacagttttcccagctcatccccacaaaacctacctcccagctcccttcctgtagacctaggcagagagagaccagctctagagaactcaggaaaggtaatgttagaaacctgagaactgacagggtcaggaagatagcctgagcagcaagaagtatggtctagtatggtgaaattttgttcatcttagatttttttttgcattagtttttatttttaaaatattgcattaaaatagtatctatttattactgggttattgggcacctccttaaagcctgccctcaggcaagtgcttcactgccatcatcctggtcctggccttgccctggggaagagatgcctgctgacatccgcttcagcttcgccaggctccagcctggaccagctaacatggctgtggaggagccacttctctcaacacccctctgttagggaggaggagacaacttcttttattttgttttatttatgtatttatttttattttttattttttatttttattttttgagatggagtcttactctgtcacccaggctggagtgcagtggtacgatctcagctcactgcaagctccgcctcccgggttcatgccattctcctgcctcagcctccggagtagctgggactacaggcgcctgccaccacgttcagctaattttttgtatttttagtagaaacggggtttcaccgtgttagccaggatggtctcgatcttctgacctcgtgatctcgtgatccgcctgcctcggcctcccaaagtgctgggattacaggagtgagccagcgcgcccggcctatttatttatttatttattttttgagaagagggtcttgctatattgcccaggtaggtctcaaactcctgggctcaagctatcctcctgcctctgcctccctagaaacaacttctttactggccattggcaagccaagttcattgaagtctccctcctaaacctttacaaagatttaggaaacagattaacaataaaacttcaacaaacccaggatgggagagttactgaattaaattagagcttttctcgtacatcacgctaaaggtaaattattttgtttattcgaagccacattcatattataaaatggtttgcttctctctctctgtctctctcaaagagatgaggtctcactgtgtcacccaggctggagtatagtggtataatcacagctcactgcagcctccaactcctgggctcaagagaacctcccacttcagcctcctaagctgttaggactacaggtgcacatcactacctcttgctaatttttttaattttttgttgagacaggattccgctatgttgcccaggcaggtctggaactcctggcctcaagcgatcctcccaccttgacctcccaaagcactgggattacagatgtgagtcaccacacccagctggtttgctgttctgataaaggtcttgaaaagacaagaggagatgtattttattggcatcattatcactaactagcaccattgcttactgaatgccatgcatggagctgagagctctacaatatacattattttgcttagtctccagcaactgcaatggcaaatttgaggctgcacaaagatacacatgctggcctcagggctgagccgggatgtgaagtcagatcagactccagagcccacatgccatggagccttggagacaggtttgctttcactctgttatcttgcacaggcctaactctgggcagggatgctgagcccagggctgaggcttggccaggcggctgcaatcgcagatcaaccctgtaagcctgaggacccgcagcttccgtgggaaggtacagacctcctgccctgctgcacagccctgggcagagcaggcatgcccaggaccacactccacttcctccggatggtgccttcagtggagtcagcggcaggaccactgatttttcattctaggtccctatgcaaaaataataaagacttcctgtctgagcactagggtaaacagatcttagctaaagggaggaggaggggttgtgggaagaacctctgttgtcccagctggaaacttaagcaccaggaaatgcatttccgcgtgttcccagcctgccgaaaagtcaggcacaccaaggacaaagcaatctccaatgcctggcccaaatttggcttttccccttccccgcctgctcctccaggcttcctgggtttttcactctcctccgtttcccctctgggcaagcccagagggtgtttgtttaaagtacctttcgctaacattccttcccagccattctcacagcttttcactttgcattacgcccagagcccctagatgcagtctctttacccagccaaccctctttcaaaaactaacctatattttacatggagaactttaacccgtttgcctccaaaaaaccctgtaacattacagagacgctaaagtctccttggacctctaaaaatccatggctacccacttcagctccccaacaggtaagcactgaagcactgactttggaatttttttttcagaaatgtttcctgtttttgcaacatacattggacttcattaaaactatggcatgtgaatttttttatttttatttttatttttgagacggagtctcgctctgtctcccaggctggggtgcagtggtacgatctcggctcactgcaagctccacctcccaggttcaagcgattctcccgcctccgactcctgactagctaggacgacaggcacccgccaccatgcccagctaatttttgtatttttagtagagacgggatttcatcatgttggccaggctggtcttgaactcctggcctcaagagatctgcccacctcggccacccaaagtgctcagattacaggcgtgagccactgtgcccggccgaggcatgcgaaatgttattgatgagtttggttactttttttacatatatactgttctacgcatttttttttcactcaacaatacctcttaaagatctatttgcatacacacagatccaagtcacttaaaaaaattttttgtataaagccccatgctgtgaactgcttctatctactgaggcattttgatattgatgggcatttaggcttctgctatttccaatgctgcttcagagacgctttctttgtgcacatatacatttctcgagggtagataacacagaagggaaattgctgggtttcacggtatgcacatttctagctctgagggcatccaaagtgcagctgtactgatacacggggcaccagcatcctctgggagcagcgcccttacaggcctgctagtacctatcggacttttaaattgctgcccttgtgatgggtgacaagtgttgcttaatttgtatttcccttaagatttggtagggtcaaacttttttttttggtaatacattttacaagtcctttttcatacctcttctgtgaattgcctgttcatattctttgcccctaaaaaaaaaattgagtagtttgtctttaaaaaaaaaaaaacactttatggatctatgattgacatataaaaagctgtacatactgatgcatacaacttgatgggatactatacacagccatgaaaccatcaccactatcaaagccataaatatatccatcacctcccaaagattctcccattccctttatttatttatttatttatttagagccagggtctttttttgtcacccaggctggagtgcagtggcacaatcacagctcattgcagcctcaacctcctgggctcaatcaatcctccatcctcagcttcccaagtagctgggactattgcttttgagacggagtcttgctctgacgccaggctggagtgcagtggtgtgatctcagctcattgcaacctccacctcctgggttcaagtgattctcctgcctcagcctcccaagtagctgggactacaggcgcacgccaccacaccgagctaatttttgtatttttaatagagacggggtttcccatgttggccaggatggtctcgatctcttgacctcatgatccgcccgccttggcctcccaaagtgctgggattataggcatgagcctccgcacccggccaggatctccttttttaaggctgaattgtattccatcgtgtatacaccacattttctttattcattcatccatcaatggacagttaggttgtttccatatcttggctattgtgaattgtgctgcaatggacatgagagtgtaagtatctttttgagatactcagcattgctggatcatatagtagttctgtttttatttgttccagtaaccttcacactggtttccatgatggctgcaccaatttacattcccaccaacagtgcaccagtgttcttttctccacatccttgccagcacttattgccttttttaaatttatttatttaaataatagcgatccgagccaggtgcagtgactcatgcctgtaatcgcagcactttgggagtctgaagtggatggatcacctgaggtcagatgttcaagaccagcctggccaacttggtgaaaccccgtctctactaaaaatacaaaaactcgcctgttgtggtggcgcatgtctgtaaacccagctacttgggaggctgaggcaggagaatcacttgaaccgggaggcggaggttgcagtgagccgagatcatgccactgtactccagcctgggcgacagagtgggactccatctcaaataataataataatatccatcctaacaggtgtgaggagatacctcattgtggttttgatttgcactgcctggtggttagtgatgtgtactttttcatgcacctattgtatgtctcgtttctcttttcaaaccattgctgcttccctgcttaggcacacacaggtgctggggacatgtgggatctcaaaccacctaattcactttggagatgggtgtaggctgcagcagctgcaggctaccctgtgaacgcacagagctctgcagccgcaaacgggctggcctcctcactggccttggcctgacatgtgatgctctgagggactccacctgcaggagcctccacagtgagtgcctgctttacgcaagtcctaaacaagcacaattgccacttcctttaaccccacgatgctgacagatgccaacacctggttccaagagttgccccaaacctcccagtggggccttgggaagactgggatttgaattcagatcagcctgtctgcagtgcccatgaccctggctgagctgagccgggttgctcccggacgctgaggagcgtgtgggtgagtgtgggcagggcctggcctcagggccctgtacccttaggcaacacccatgctctccctaccaggtcggtgccctggttcatcccctgagcctctggaggcagagtactagggagctgggcttctcagtgaggggaaccttcccattcccccctcctcacagctcccacctcagaggatgctgggtaacaggagcacacacagagtgtcccccaacccccaccagctgagaaaaccttggtgaaggccagaggcccacgcaccctgggtgctcctgccccaagaggagagagagagagagagagttgggggagggattcctgcaggtgaacagatcaaattttggtcaaattccaataaattctcacttaattttaacatttaatgttgaaaaatcctaatggtgacctgattccctcttttgaattccagccctcccagataacctatctctcgaggtgacaagccggtgccacctgaattcattactgcctgattaattatgctgcctttgtaccagggaaacagggacttcaatcagccgtggccgccatcccctggccgtcgcctcaacaggccggccgctgtcagggagcctggcccctcgcccagctcagggttggccgagaagctgggcgcagtggctggtgagatgtggctgcctgcaatcagagggcctgggatttggggtcctttctgggcagtcaagggagagaggggtgagccaggtcagaggctgcagagtggagatttctgctctgtccctggagaggcctgactgggaggccctccttggggccttgagctgtctggacataccagacgtcactaaaactgggcattgtcccttcaggaggaggcaccaggtctcagaaggagctatttcaagcacatgcatcccgtgagatacatgattactttggcaaaggggaaggttttctggccagctacctagacccgtgtgtgggcacagccctcacagacatctctgcggagcttcaacatggtgtcagggagggtcaactccaggcactgaggccaggcaagaaccagcaccctcagctctgctggttcattagcctgacggggtatggctacagtggcctttggtcctgtgcatcctgcatttgtcaaggtccacaaacttgtgaaacccagtcccatctgcagagtggcagatgatgtatttttttcaaagaagaagaagatgagattgcttttaaaatgtgggttctctgcccctactctgagcctacacagcatggggggaccacagaaggggtaccccctagcccaagtgccccatgagccttggcctcagcaggtccggctttgaatcctactccgtcatggatgtactgtgtgactatggccaagttactcaacctctctgagtctgggttttcagagagacatcactatgtgtcccacagggtggttatgagagaaaaataaggaaacacacacaaagccctttatgttgcccggagtgccttctgacatgggccagcttcacacagctgctgtggtgacactttgtctggggtgaacagtcaaaagggcagggttggtttcattacttggctgtgtgtgaacacatcatctgggactgaacccatccttgacccccgtccccccgtgaagcttcagcccctgggagaacatgtattcttgtgtttttttggttcttggcggagggtgggagggttgtttttctgttttttggtttgtcttttgtttttgtttttttttgaggcggagtctcactctgttgccaggctggagcgcaatggcaccatctcggctcactgcaacctccacctcctgggttcaagcgattctcctgcctcagcctcccaggtagctgggactacaagcatgtgccaccatgcccggctaattttttttttgtatttttgatagagatggggtttcactgtattagccaggatggtcttgatctcctgacctcgtgagccacccgcctcagcctcccaaagtgctgggattacaggcgtgagccactgcgccatgttcccccaccccgcccgccttttttttttttgagaccaagtctcactctgttgtcacccaggctggagtgcagtcgtgtgatctcagcttactgcaacctccgcctcctgagttcaagcaattctcctgcctcggcctcccaagcagctgggattacaggtgtgcaccaccacgcccagctaatttttgtattttaagtagagacagggtttggccaggcctgatcatgttggccaggctggtctcaaactcctgacctcaggtgatccacctgccttggcctcccgaagttctgggattacaggcacaagcctccgcacctagtcgagaacatgtatttttactgagcgattttgcaaaaccccatttctaggccacaacagggccatccacaccaccagctctgctgcagtgccccacccaagcggcccttcctccaggcttgacttggcctccttctaagccacctggcaggtgcgatcagagaggcctgtcccacagggcaggaagggagaacacaggttccaagaaggcctaggacagttgctcgtgttctggggtgtaagtgggcaatgtgtgtgcagagggaaggcagggaagccatggggagtccggcagtggttcctggacacaggtaaatgggagaggggacattgccaatcagaagtcaagaccagagttcagtcaagggaaaagtctgagtccaggctgtttggaaatggtcgtaagtccagcacaagaaatcttcagcccatgggaagtcctggggcttgggctggtgtccatggtgcagatcccggggtgcagaagcagagtcagagcagggctgaggcgtctaaacctccattcggagccctgacttcacctagagcacacagggtgaggtcctgccagacactggtggctgggtcccagaaagaaagttctagttagtacctgaagtctcctgaggataggagggaggtggctggggcagggaggctgaggtacatatacccaacagaaaatggggcaatggcgtctgtaaaatctctttagcagctgaacctacatggttcaaactttagaggtttaaaaagaagcaaatttggaaggctataaaagatacacaggccacttaatcaatggcttcaccttcaagtgggggcagtagccaccttctttggattccaggtgcctagtccaagttccttggaggggaatcttccctccccaccccctaccccactgagctccctggggaaacagcatgaagcccactggagggccatttttctcagtaggggaggttagcactctcctggtgcccagatgtgactctgccaaaaggcttctgaaaaagacaggacaaaaagcagacagcggggcaggggctcctactcactacccctttaaagtcataatatatggccaggcgtgttggctcatacctgcaatcccagcactttagaaggctgaggcaggtggatcacttgaggtcaggagttcaagaccagcctggccaacatggtgaaaccccacatctactaaagatacaaaaattagctgagtgtggtggtgcatgcttgtaatcacagctactctggatgctgagacagaagaatcgcttgaacctgggagacagaggttgctgtgagctgagatcacaacactacactgcagcctaggtgacagagcaacatcctttctcaaaaaaaaaaaaaaaattataagatgcccattacactggtaagagattaaaggatttgcccaaaggcaaaaacccaactgctatgtactgaattgtgttcccctaaaattcatacattgaagacccccccaacccccaacatgatggcatttggagacagagattttgggaggtaattaggtttggatgaggtcatgagagtggggcctcatgatgggattagtgcccttagaagaggaaataccagagagctctctgccatgtgaggataaaggaagaaggcagctgtctgcatgcccgggagggagccctcacccgaatctgactgtgctgcattctgatcttgaacttcccagcctctagaacttctgtgatttaagccacccaggctttggtattttattatggcagcccaagccaactaagacaccaatgagccgtcttctcttctctcttctccctgtgtagctgtggagtcacattgttggccaagtggatcaggagaataccttgctccagccaaagaagccattttacatagacaccagttcctaatgagtatgtgaaccttccagaaactgtcaagggaaagccaggatcgtaatggccagaggatcccccacaaggaccaaggccttctgccaccttcccctgctcatcctatcacccgccaggagatgaaaggctggtgccgagtctgcaggcagggggccacagggtgagcaaggggtggggcaggctccagctttgaaccctacctaggccatctctacccatcaggagagcagacacagagcctgaaatgtgttcccctggtctccccaaatgccacccccaagcccaggagctccacaagtggggaagaagatctctaggaagcccacctctcagctgcctagtatgctgggaagagcagtaggccaagagtcaaaagacatggcatctgtaggtcacctcctcaatgtgtaagctgggatctcagggcaagttacttcacctcctggtggcttaatttctaatctctagtgtatcaacactcccgaattgggtgattatagagatcaatgaaatcaaaaataataggggcttggctggatgtggtggctcatgcctgtaatcccagcattttgggaggcagagatgggtggatcacttgagctcaggagtttgagaccagcctgtccaacgtaatgaaaccccatctctactaaaaatacaaaaattagccaggtgtggtggctggtgcctgtagtcccagctactcaggaggctgaggcaggagaattgtttgaacccagggggtggaggttgcagtgagccgagatggtgccactgcactccagcctgggggacagagcgagactctgtctaaataataataataataataataatagctctctaaaggtgcattccctttccccttccctcttttttctttctttctttctttttcttttctttttctttttctttttttttttttttttttgagacggagtatcactctgtcatcacccaggctggagtgcagtggtataatcatacctcactgtagccttgaactcctgggctcaagccatttttctgcctcagcctcccgagtagctgggactacaggtgtgtgccaccatacctggctaatttttagcttcttgtagagattggggtcacatcacattgcccaggctggtcttgaactcctggcctcaagtgatcctccttcctcagcctcccaaagtcatgggattacaggcgtgagccaccgcatgtggcctgttagctcttaattttgtaagtatttcacaaagatcaataactaggaagaaaaatcttccccactcacttttttttttttttaagatgaattagtattttggaaagaatatgggcctaaagtcaggggaaaaaaaacaagctaagtagaatagttcctgctactacctaagatctcaggcaagtgaactgttttcttcaaagcttcaatttcttcatctaaaatatgagggaatgaatcctaccttgtaatgtggctgtgaagaacaagatgttactaggtcaagtgctttaaataagggcctggaagagaatggtaacagttacagtagcttattaaatgaatctgcagatggagataagaatgacgcctaactcttgatgttataaagattcccagagttgtaaacttgtaaactgtttagcagagtcccctctcattttcaactgttaagcagtttttcaaaggaaaatagagtttcagccatccagttgtaggggtactactactttataattacatgaaaatcatatttttcatctatgagcaaggggtttatcatctgaaaattttaatgatgaaggcatctattttacaatctctgcagaattatctgctttctctcccagtgtgctaaagattactccattagtgagattcatggctaagatttctcttctgagtcaaacatcataacttcaaggcaacaacaacaaaaaaacatttctctggacaaaaaggtctcttttgactaaggtaaggtatgatgatggttttgctctcaggggtttgctggccttcctcaggaagttttcttttcttttcttttcttttcttttttttctttttttaatggagtctccctttgtcacccaggctggagtgcagtggtgcgatcttggctcactgcaacctctgcctcccgggttcaagcgattctcatgcctcagcctcccgagtagctgggattacaggcacccgtcactgcacccagataatttttatatttttagtagaaatggggtttcaccatgttggccaggctggtctcgaactcctgacctcaggtgatccgcccaccttggcctctcaaagtgctgggattacaggcatgagccaccgtgcccagcctcttttttctttttttaaatagatatgatatcttgctgtgttgcccaggctgatgttgaactcctgggctcaaatgatcctctcaccttagcccccaaagtgctgggattataggtgtgagccacggcccccagcctctgcagtaatttttttaatcaggaagaaaatgaggctgtccacagcctctcaaagactccttccctgagaggggagaggcagtagtgcaagttcattcctcaatgctaagcaaagagagtcttattcccgaatgttatttgattcatgattcaagctaaatggggtatgaaactaaaggtggatcctctccaaatacccacaggtgacatggtccaggtacagccaactcctagggaaaggtgtctggaaaagggataccacactgaggttctcacacaggcagcttcctcagctgagaggggacacagaggtgttcaagggaaaggctacctgctgaagaggaagagaagccttggcagggggcacccctgatctcccagacaacagattctggtgtcacagattgtcactccctggccgattcctgaaccaggcccaacgaactgtccttacctctgcatccactcccagcgccccactgcaatgccgtgcacacgctctgcccttctgcatccactcccgtctccccactgcaatgcaatgcacatgccctgcccttctgcatccactcctgtctccccactgcaatgccgtgcacacgcccctgcccttctgcatccactcctggcacccccactgcaatgccatgcacacgctctgcccttttgcatccactcccggtgccccactgcaaagcgatgcacatgccctgcccttctgcatccactcctggcacccccactgcaatgctgtgcacacgccctgcccgtctgcatccaccacaggctccccactgcaatgcgatgcacacaccctgcccttctgcatccactcctggcacccccactgcaatgccgtgcacatgcccctgcccttttgcatccactcccgtctccccactgcaatgccgtgcacacaccctgcccttctgcatccactcccggtgccccactgcaatgctgtgcataaactctgctcttctgcatctgcagctcccttgccagaaatgcctggctgttttctattcctctgcagataccttttcacattcttagagctggctgaaatgtcaccagcaccagaaggtgagctccatggttttgtcttcttcagcatagaacccactgtgcctcaaacaacacctggcacagagtaggtgcccaatacatatttgaggaaggccaacaggaaggagcaaacagactctccaggaagagcaagtcgctcagtggtcaggttcctgggtcttggggacagtgcatgctcattgatttggggtcctctctgtgcatgtctgcctctctctggagctgtgaactccaccagcttctgttagtatagatggctcagtggacaagaagagtgtgaccctgtctttgagctgatatatgaaaatgagtggcttcacaagtatccaggacctagttgatatgatttaatgcaagtcagaagaacacgtttctactaaccaccactgatagtggccaattcatgtggtcacattagaaagatccatccttctgccactcaaatatttcttttgtcattgttggcatggcagatctttttcgatctttgtactttttttttttttttgagagacagtctcactctatttattgcccatgctggagtgctgtggtgcgatctcggctcactgcaacctccacttctcgggttcaagcgagtctcctgtctcagcctcccaagcagctggaattacaggcatgtgccaccatgcccggctaagttttgtatttttagtagagacggggtttcaccatgttggtcaggctggtctcaaactcctgacctcgagtaatcggcccgcctcagtctcccaaagtgctgggattacaggcgtgagccaccgcgcccgggccatctttgtgctttctacttttcttcttcttatgcttaaggtgtgtctcaacatctagttggattttggttatttatgcagtatgacaatttttgtagtttgatggcagtatttagtctatttacatttcatctaattacttatatatttgaatttaaatctacagtgtttctacttctttttctatttgtctcacttattttatgttccttttgttctatttgcctttttttgcaaataaggtgaagaaaaaggaggtgaagaaaaacattttttggccaggcacagtggctcatgcctgtaatcccagcactttgggagcccaaggtgggtggatcacccgaggtcaggagtttgagaccagcctgaccaacatggtgaaaccttgtctctactaaatacaaaaaaaaaaaaaaattagccaagagtggcgttgcatgcctgtaatcccagctacttgggaggctcaggcaggagaattgcttgatcctgggaggtggagattgcagtgagctgagattgtgccattacactccagcctgggtgacaagagtgaaaactccatcataaaaaaaaggaaggaaggaaggaaagaaagaaagagaaagaaagaaaaattttttaaatgtcatttcccccttttttagcttgttagtgattatatatatatatatatagtgattatatatatagtgattatatatatataatatatatatatttatatatattatatatatataatatatatatatttatatatattatatatatataatatatatatatatatatttttttttttttaccattcctttactagttatgctatagttatgctatggactggactgcattcccccaaaattcatatgtgaaggcctaatccccagtgtgactgtatttggagataaggcctttatggatgtcattaaagttaaatgaggtcacaaggatagggccctggtccaataggattaacgtccttataagaaggggctccagagagcacgctctgtcccgaccttcatctcccctctctctgccacatgaggacacagcaaggaggtggacatctgcaagtcagaacaagagccctccccagaatctgatcttgctgggattcacatcttggacttcccagcctctagaattgtgaaaagtaaatttctgttgtttaagccacccagtctgtggtattttgttaatgcatcccaagaaaactaagatcatgagatgcatccttaacttattaaaatctaaaattaatgagtaatttttaccatttagtcaacaatgcaaggaccttaacatggcttataaccctctatttactccctctcacttttttttctattgtaatgcattttaattcttatgtacaggctaggcacggtggcttacacctgtaatcccagcactttgggaggccaaggtgggtggatcacttgatgtcaggagttggaaaccagcctggccaacatggtaaaaccctgtctctactaaaaatacaaaaattacccagatgtgatgggtgtgcctatagtcccagctactccagccggatttggtgggcacacctgtagtcccactgcactccagcctgagtgacagaccaagacttcacctcaaaaaaaaaaaaaggaagaaaaattgtatatttggttaaaaataaaaccggaaaaaacattatttttgtcaatcttcattaagatttatccatttatttaccctctctgctgcatattacattccattccttcctgcctttctaaagttccatctgtcattttctttctgcctgaaatatttcctttagtatttcttttagtgcacagttactaatgacaagtgctctcatttttgtccatttaaaaatatcctcatttgacttgcattcttaataagtatttttactggttatagaattctagattggcttttcaacactaaaatgtcattccactggcttctggcttccatggttcctgttgaaaagttagctgtcagtcttattgtagttccagtaagggtaatctgtcattttagttggatgcatttaagattatctctctcttattattttgttttcaatagttttactgtaatgtgcctatgagtgattttctctgtattcataatactacaatactgcagggcttcttggatctgtgattcatgtctttcatcaattttggggaattcctggccattatctattcaaatattgcttctgttttattatctctctccttttcctcttcttctgggacttcaattatacttatgatagtattatgttcaatatgtgatataccatttctgtattttccatctatttgtctctgttttcagtccaaatagtttcttctgatgtatctttcaaatcactaattatctcttcatctgtgtctaagatgctttaaattcatctaatgtgtccttaatttcagttatattttttggttatagaacatccattgattcttttttatatatttccattctcaattgaaattctccactttgtcttttgtctccttgaattatcaatcagaggttattctaaagtttgtgtctgatacctccaataactaggtttcctgtaggtcagttgctattttctttctttctttctctttctttctttctttctctctctttccttctttctttctttcttccttcctttctttcttcctttctttcccttttctttctttctttttctttcttttttttttttcaaggtctcactttgttgcctaggctggagtgcagtggtgcaatgacagttcactgcagcctccatctcccaggcccaagtgatcctcccacctcagcttcccaagtagcacacccagactacagatgtgcaccaccacacactgatttttttttaactttctgtagaggtgggggtctcactatgttgcccaggctggtctcgaactcctggcctctagtgatcctcctacctcacctctcaaagtattgggattataggtgtaagccaccatgccaagcctgttttctatttattctcttggttttgagtcatttggtcttgtcttctgatatgcctcatatattttgaacaaatgctgcatgttttgtatgaaaaattgtagaaccaatgtgatgctgtagatgatggtatctttctccagagagtttattttgcttttgtcaagcagttagtatagaggcagagcatcttaatctgatttgaataaaagctgaatcttttttgagagttgatcagaggctgtaaccaaaagcctagggtattaccagagcctttctgagactgccaaagctttgcccagcttcttagcctttaaatcactgctcctagaagcaaatgcctggaggggaagaacagtgccaaatgttaggctcatctttctaggtttccctttctctaggatcttcccctctcaagtcctcactgtctggatagctctctgattttatttatttatttttttcatggccaggtctcattctgtcgcccaggctagggtgtagtggcactatcttggctcactgcaacctctgcctcctggattcaagcgattctcctgcttaagcctcccaagtagctggaactacaggtacatgtcaccaggtctagctaatttttgtatttttagtagagatggggtttcagcatgttgcccaggctggtctcaaactcctggactcaaatgatccaccccacttggcctcccaaagtgttgggattacaagcatgagccaccatgcctggccagtctctgatattttaaaacagatttttaaaattatctaactgttccagttgtttaaggtgggaagtttcatttgatccagactggcgttccagagccagaagaagagatctcaactgttcctttagcataattcctcacctataatgatggttagcataaaaattaaggtttagggtattggctttgaattcataaattccatctgggtgggtttaaaaagtataagttggttaaactggttggaaagagtggaaaattatagttctctgttaagataaattgttctaactaaattagtataagaagcgtttgagcagtcactggaaacatacaatacatcccagttaactttccggtactttttctcttagtgaagtatacgtttgttttatagcagcaagaattagggatgcttctagccttctcagccttctgtcaggctctgggtcatcttgtagtatgcttgttaggtccctaagaagacactgtgtttgcctctctgtttatgcctcaggtaaacccattcaataaacatatagcaatcacatttaaagattctcatcttacttatccaaaagtttcagaaattgtccttttaaagtacaaacatccataaaaaccgagaagatgggccgggtgtggtggttcacgcctataatcccagcactttgggaggccgagacgagcagatcacctgaggtcaggactttgagaccagcctggccaacatggcaaaaccctgtctctactaaaaatacaaaaaaattagccagccatggtggcgcatgcctctaatcccagctacttgggaagctgaggcaacagaatcacttgaaccgggaagtgaaggttgcagtgagccaagatcgtgccactgcgctccaacctgggtgacagagggggactctgtctcaaaaaaaaaaaaaaaaaaaaatccctgagaagaagaaaagaataaacagaacacacacacaaataattttgcacagcagagtggagaggtgatacagccagccacttgtcaaataactacagctgttgcaagcttgatcttggcaggttgttcatgccacatggggaaaagggccttcaaagcacaaagttcgacccattctggcagagtatcaggatgaactagttaacctgaaggccaggctgcatgctggacaagaacagctgggaaggctgagggcatctactgcaggcactcacgttttgaagcacaagtaggttttattaccaaggctgtgcatagccaccagcgaaagtataggtaaggctgcttagtgaactgctttgggaactgaatgagcagaaacgaatctgtgagccctagagactatcctctaaaaaggccatggactgattgtatgataatgtttgggcctctgaacacaagtgggagattcaagaccagccactcaaatcagattgcttcagttaataaaataagggacaatgacaggaagtacatggtgtgggggctggtcctctcaactccttggagagacacacagaagaaaaaaaatggttttagctaggctataatcacagaatctgttaggactaaacggatcctccttgtagatagagtctaacgttaaccaccttatgttacagatgaacagacaccatgccgaaaactccttttcacctgccagtcctcatatcaaacactcattcttcggcaaaggcttccctgcttccatttggtggctctatccttcattcatttattttctttatttttcttctttttttgttttagagggagtcttactctgtcgcccaggctggagtgcaatggcacgatctcggctcactgcaacctccacctccccagttcaagtgattctcctgcctcagcctccctagtagctgggattacaggcatctgctaccatgcccagctaatttttgtgttttttagtagagatggggtttcatcatgttggccaggctggtcttgaactcctgacctcaggtgatccaccctcttcaacctcccaaagtgctgggattacaagcgtgagccatagcgcctggccttcttcattattttctaatctcaagtgtgagctccatcatttcaggagctcaagaaaacaaaaggtcctcaatatcatttgctgaagggacacatgagaaggggtatctgcaaagtgcactgagtctccattgtcctgagccccagcccaggcaattcagccagactccaatagcagttcaaaagtttcagaacactctgaaaaaacaatttaaacatgatatgaaatatagagaataacagaatgacccaccatgtacacattactaatgccccatcattttcccatctatatcttcacacacttcccttgccccatctaaaactacttacacacaaatcccagatatcctatcattccctctaaatattttatcctgtattttcagaagataattttaaaaataccaccataatattaccgtttctaaaaaatttaagaagacttttaaaatatcaaatatcccatcagtattgaaattcacaagtgtcctaaaaacgttagtttttttttctttttatcatttgtttgattcagaatctaaatgtgattattttccttgcaattcattattgaagaactgggtcgtttatcctgcggttttacaagagctggattgttttgattatgtccccatagtgctgtttaacatgttcccctgcagttttcatttcatgtaaattagtacaggagtccccccccatcctccaggatatattccaagacccccagtggctgcctgaaatcatggacaatagcaaaccctacatactgtagagtatgtttcttcatatatatatatatatatatgaatgataaagtttaatttataaactaggcacagtaaaagattaacaacagtaactaggcacagcaagagattaacagcaataactaataataaaatagaacaattacaacaatgcactgtaataagagttacgtgaatgtggatgtagtaacccagacgggtattgagtgactaatgggcaggtggtatggacagtgtagatacacaaggggatgatcgcatcagggtggtggagtggcttcgttgtctggggtaaatacttgaggttcattgcctcataccaaggaaatcaaggatccagatgtatgtgaaatgaggttaacagcggaggtttaataggcaaaagaaagagaaaagagaatagcactctctcccacaagagacggggcgggggggaaggggcggggcggggaggggcggggcggggcggggggccggccggcagccctggaggagtgcactggatttcatagataagcttgaggaggcggtgtccgatttacatcgggcccaaagattggttggactaggtgtgatgtttacataactcgcagggaagccggctaccccaccctaatctttttttttattttagacagagtcttgctgtgttgcccaggctggagcgcagtggcgcagtcttggctcactgcaacctcccaggttcaagcaattctccggcctcagcctcccaggtagctgggattacaggcgaccaccactaggcctggctaatttttgtatttttaatagagacggggtttcaccacgttggccaagcttgtcttgaactcctgaatgcaggcgacacctcctcccccggccctcagcttcccaaagtgctgggattataggcttgagccacctcgcccagcccaccccaccctaatcttattatgtaaatggggtctttgcttggccggggttatgttgcctgctccttggtgtacacatgtctggcaaagagaagggaagattgagccgcctttttgaacatgcctagtcccaggtagccttttcctattggcacagctgctggcattcacccgtgcaagcttctagcttgcttgtctatgtctgcagctcgattttacaggctgctctttgttagaaaagaaaatgatttgggggctgctttccattaaaaggaaaaccttaccaaggacttccttaccctcactatctgcctaaatcatttcttcttaactcccctatcagtgggacagagcgggccagcaggagatttcattgtgctattcagaatggcacgaaatttaaaacttacaaattttttttctgtaattttccatttactatttttagactgcggttgacttgggtaactgaaatcaaagcaagacggtgggtaggggggaccactgtggttgatctcagtggtctagacaccttttgggacccctcagagctccatatatcaaacctgaatctgatcattcatgggggttcagtggggccccaagagatgtctagaccacctcatagttgatgctgagtttttttatttcaaggcatataatgtggggaaatggagtgatctctttttctgatgtcagcagccactgctaatcgtgcctacatccattcattcatcagggatgcaaaatagtgatattctgtctattgattcttcctcacttaatagctggaaatactttaggagaaatacccatctcagataccgtgtggccaccaaagcccaattttaacacaattgtaaccaagacaatgctttctctccttacagtcctctgcaggaggttgagcgactttaagcaaacctttttttttttttttttgagatagagttttgctgctgtagcccaggctggagtgcaatggtgtgatgtcggctcactacaacatctgcctccagcgttcaagcgattctcctgcctcagcctcctatgtagctgggattacaggcacgtgccactaagcccagctaattttttgtatttttagtagagacagggtttcaccatgttggccatgctggtcttgaacacctgacctcaggtcatccgcccacctcggcctcccagagtgctggggttacaggcatgagtcactatttattttctagccaagaactgactggcagaggtgggcccgacagctgtgggaaacacattcttgcctggttctctcccggccagtcagctgaagcagaggccctgcctacccagagattttctcaaagcagcacggctccagggcctgctctaaaggtctggcctttctctttgaaaatgttttctcctgtaattaagggattttctaacttgagcaatagattaaaattcatcaaaattatattttcagaaagccataaacctgaagctactaaggtctggctccaggaaatcctgaatccaggaaggatgctcagcgggacagaattgaagacaatagttcatcatctttccttcccaggatcgagaatatcccaaggaaatgccaagtaaaaaagtaaaatcagcgattgattttgcgtttggagaactgaccacgtttcttgatcaaatgccgattgcaagtctgagtcaaggttgagcatataaaggaatcctcccgggtacctccccttggggtcttcacatgatgtgattttgaaaaaccagactcgggcgatcagagacctcactgcggaggaaatgaaggatgcctcgcttccaatacctggctcccatgaacactccctcgggtccctgctagcgccagcctgagacagagagcgcttcctgtcctgctgactgcagaagttaaacggaatctccactcccggattgaggaaagaaaggcgtcttcctgttgattttcgcgaggctgctgaccttcgcggcgccccgactgggcccaccccgcggagctgtcggggcagcaggcgcccaggacttcctgaatccccggcccctctggcctaacctagatctcccaggactcaggcctgggaaaatcacggcgtctgccaggccctcctcgcaggctttgcagtttgctaactcgcggtgcggccttgggacagtgcctcagtttccccaagtgtagtgaagtagggctggaccgtgattctcagaatcacccaagaagcttttccagcatcgcctgccagggtgtccctggggacccaccggatcggagagggggtcgggggcgaaaagcgccaggaggctggcagcccgggctggaacccgggactcgggctcgcccgcctcggcagctactccacggtctgcctggccccggagctcgccttcggcctgggcggggtcttgcgcgtctccgggccggttccgggaggccgggcggggcggggcgggccgggctgggttgtcccaccggaaagactcgtttcagctggagcaggcggcggccgggcggaaacagacttgtcgcccccgcctcgggcactccccgctcccccaccccaccaccctccccccccgccctgcgcggcccgccagggtccgggaatcgctggcctgcagctggggcagccccgggtcacccccgcccacgccttccccgcccacaggacgcgccccctaggccacacctgagctcgccctgcggtcccgggcagtgactccgccgagcctcggtgggggaggggacaggggagagaatagggaagaggggcgcgatctgtgtctgggacccgttgccaagaaacccgaccctcgggctctggccatcagcagccgcggtgcagctgcctccccctgcctccaggtcgcccagcagagctttctagagctgggtgctcagaagaccccaggcggaggcaagaaccttgggccgcggctctgtgggaaaagccctcggggaagccagacggcgcgctccagctccccatcgcgggcgtgggccccggggtggaggcagttgggtcgcggccctgccacccccatgctgcacggcctcggcccagtgccaccacctctgtgggccgccgtttcagcctccagatggggtggcggcgggccccagcccttgccccaagtctctaaggaagggtctggcctggcccgcccagatccgagctgctgcgtacgcgcggggctgggagctgcaaaaacgcccggggcccagggtgagcggctgggccctcgggggacccggcgcgcgcgggggctccagctccgccctgttgggggccagagcaggagggaggccgccccagcttgttctgggccgcagccctgccgaccgcacgggacaggcgccgcgtcctctctgggcctccaagacgcagactagaagcccatagctgctgggaagatgggcaccccaggtctccgcgcacggccttcccagggccacggtgaaacatggatgcgacactcaggcaccttcccggcccccggcgaaaacgcaaagcctgagcccatgatgggctcggaagctctgcgggattgagtcatcagaggaatgctgatctagaagtacaatggctggaagacacccgcagaaaccgcgggcactggagagcaagtgcagctttaatctccaggcgtgatttagatggaaagcagcctgaagaccagttaagagaaccgcgagcagagcgcgctggactagcaccaacagacgtgagttcgagaccgtcctgccccttaatcctgtgtgaccttggtccattttttaagtctgtgagcctcgcagtgttctcattcctgaaaagagcctgccccatctccggactgcagtgagaacaaaaggagactatgaacatgactttttgccacttttgaagccccacactgaggaaagattttcctagcacttgggagattttctttagcaccagctgccaagaatgctgggaaggagacagccccatcccagaaggaagacaccttaaatcagaactttatttttcctcctatgaaaatacaatctaatactggagaagtgtaaaaattaaggagtcattagaagccatttgttgttgttgttgttgttattgttttgagacaggatcttactctgtcacccaggctggagtgaggtggcacgatcattgctcactgtagcctccaactcctggactcaaacaatcctcccttctcggcctcccaagtacctgggacgagaggtgcactgggcgtggtagcacacatctgtagtcccaggtactttagaagccgagaagggaggtctcactattttgcccaggctggtctccaactcctgggatcaagccatcctcttgcctcggcttcccaaagtgttgggattataggtgtgagccaccactcccagcctgttgttttaactttctatcaaagaaatggatggagggtggacagggatgctgggtgctttagattagacttgaaagagttaacagcataggttacagaatcacacatacccgaattggaatctcatcttgaccctttactaccactgtttcgttatgttagtgacttaacctctctgtgcttcagtttcttcatctgtaaaatgaagaaaatggcaccaacctgtggggttgttgagaagatgaaatgcaatagtgaatgtaaaagtgcctgacaggacccagcacgtggtaatacataataaatgctagctagttttggtttccatccttccttcctaccaatttttattgtaaaatatttttaaacatgcggaagagttgaaagaatcatacagtgaacacccacgcatgttccacctagcttctgcattaacatttttactctatttgctctatcacatatctgtccatctagctttctttccctctatccatatatcaatccatctgttctggttactactgttatgtaacaaattcctcaaaacttcgtgacttgaaaaaaacagccatttttgtcatgctcatggatttcatgagttagaaattcagacagattggcttgttgctgctctaggacgtctggggtctcagctcggaggacttgatgcctgcaggctggaatcgtcctgaggcatcttcacgcacatgtctgggggttgccagcatcgtgcctgcgtgtgatctcatcatgaagctcagacttcctcccagcatggtagcctcaaggtagctgaacttctcccagggcggctcagagctccgagagtgtgttctggcaaacaaggcagaagttgcagtgcctttataacccagccttgcaagttacatagcattgcttcctgttggtcaaagcagccatagattcaaataggggagaattaggttccacctcttgctggtgatgtgggaggctcattttgtagatctgtggcacaggaactgttgtggccatctttggagatgccacatttacccctttggtcacaataatgcttgtgcaatatgcacaaattctcattccatgaaatcatcaggctcagagtccaagattcctttttattgttgttgttggcttttgttttttagagatagggtcttgctctgttgtccagattggagtgcagtggtgccatcatagctcatttgagcctgcaacttctgctccagtgatcctcccacctcagcctcctgaatagctgggactgcacacatgcaccaccacacccatctaatttggtttttattttgcagagacaggggtctcgctatgttgcccgggctggttttgaacatctggcctcaagcaaccttcccaccttgacctcccaaagtgctgggactacagatgtgagccaataaaccacttcaaaataaacctttcttgtccgggcgaggtagctcacacttgtaatcccagcacaccaggaggccgaggtgggtggattacctgaggttgagcaacaaggagaaaccacgtctgcactaaaaatacaaaaattagctgggtgtggtggtgtgcgcctgtaatcgcagctacttgggaggctgaagcaggagaatcacttgaacctaggaggcagagtttgcaatgagctgagatcacgccactgcactccagcctgggcaacagagcgagactctgtctcaaaaaaaacccaaaaactaaaataagcctttctctcttttgggttccccatgaaattgctgtgggacaatgcccttaagattcctagaagttggttgggcgcagtggctcacgcttgtaatcccagcactttgggaggctgaggtgggtggatcacctgaggtcaggagtttgagaccaacccggccaacatggtgaaaccctgtctctactgaaaatacaaagaattagctgggcatcggggcagatgcctgtaatcccagttactcaggaggctgaggcaggagaattgcttgaacctgggaggcagaggttgcagtgaactgagatcccaggctatgcactccagcctgggagacagagcaaaacttagtctcaaaaaaaaaaaaaaaaaaaaagattcttagaagtcctattgtttaacacagaggatctacaaagtatgctgttagtttccttaagaggctttttgtctggttgaaagggtctacaaggcaccaccataaaattttctcatatcttaaagaagaactttacagtggggcacttggttcacccttaccctgagctgctttcctaacagtgccctgggtctgatctttgccctttttgaatcttccactgggagaaacgtggaatgagaaacagttttttgttttgttttgttttttgagacagggtcccactatgtcacccaggctggagtgcagtggtgcaatcgtagttcgttgcagcctcaaccttctgtgcttaagcgatcctcctgcctcagcctcccaagtagctgggactacaagtgcacgtcaccatgcctaactttttaaaaaatgtattgtaaagaacattttttaaatttttatttttattttttattttttgtagctatgttgctcaaactggtctcaaatgcctgggctcaagcaatccacccgccttggcctcccaaaacgctgggatgacatatgtgagatactgtgcccagctgagaaatagtttttgaatccacctggtcccgacttctaaattctgcctgaagctgaatatttctttctcttcctctacgatacagagctaagagaaaacaaatggtagctcaggactctgcttggaaatctagaaatagctggaggctgggctaggacaacttgaaaattaagacaagcaaatggaggaatttcatgtggcttatcaatgaagttggcatcatgacttcatggtgcctcaagatagtcagacttcttaccggatggttcagggctccaatcacaagtgttccagtgagtaaaacggaagtgtcaggaacttttctggcgcatgcttataaggtacacagtatcacttccatgtaactctgctggcagttgagtgactgttccactcaacactgatggcagtcacacgcccatctagattcaaggagaggggaattagactctatgtctagaaaggggagtgtcacgattacatttagcagaacacgtgggaacggagatgttgttgtagtcatttttggaaaatacaatctgccccactgtccatgttttgatgcatttcagagtactttatagacatcattacacttccccaaaattcaccaaaaatgtgtgagagtttcgactgccctcgttctcacccgcaaatggagctgagggccatttacattttaatcattctggttggtgggtagcagtatctcattgtggttttaatttgcatttcccagataactaaagatattgaatagtttttcatgttcttatacaccactcatatcttccttggtgaagtatcttttcaaatctttggcccattttttggactttatttattgatctttttttttttttagagagacactctttggctcaagtgatcctcccacctcagcctcctgagtaggtgggaccacgggcacatgccaccatgcccagctaaatttttttttatcttttgtagagataggggcatctgtatgttgcctaggctggtcttgaactcctggtctcaagcgatccttccactcggcctcccaaagtgctgggattacaaatgtaagccaaaatgcccagcttgagatttttttttttttttccaaatggaaatccagttggtccagtacaatttgttcatgagtttcctttccctgttggattgcattatgtttgtcaaaaatcagatggctggccaggcgcagtggctcatgcctgtaaatcccagtactttgagaggccgaggtgggaggatcccttgagcccaggagttcaagaccagcgtgggcaacatagtaagaccccatctttttttttttaataaaaaaaatcaaatggctgtattcataaatatgtgtttctgggttctctatgctgttcgttgatctatttattcctcctattgctggtcccacactgtcttgattactgtaatcttacagtaaatcttgaagttctcgttcctttttgagtaagatgattcctttttaatggacaaaatattgctgacttctacatagctgttgcatttctagcatgttgatttagcaaataaaagtagtaaaaagaacttgtgaacacctgaaaatgaccttggatcttagtgatcacaatgacaactacagatatctagaaatctgtcacctatgcacaggtggacatcacatggggatgtgtgatggccctgaggtgaccacgtattcctcagcaggaaaacggggtgtttttctgctgctggaatcactgatagccatcaatttaggtgagattcccaaagcagtggatttcttttcaacaggaagataatcagttgagttttccaatttgtccatgtgaggtttcttccagactgagcaagatacacagggatgagagaaggtactctatgggatttagtctttcccaggagacactggattggatgtcccaagaggaccgttatgagttgtgtgtcccgcaaattcatgttttagtcctcacccctactgtctcagaatataacctcatttggaaataaggtgtgtctgagtctgttcttgcactgctataaagaaatacccgagactaggtaatttataaagaaaagaggtttaattggctcacagttctgaaggctgaacaggaagcatggctgggaaggccttgggaaacttacaatcatggcagaaggcaaaggagaagcaggcacatcttccacggcaggagcaggaggaagagagaatgaggcgggaggtgctacgcacttttacataaacagatgtcttgagaactcactgtacagtaccaagggggagggtgctaaactattggtgagaactccacgcccatgatccaatcacttcccacctggccccacctccaacactggggactacaatttaacgtgagatttggagggaaacagatccaaaccatatcaaggtggttgcagatgtaaaatgaggtcatgtgcactgtgaccttatgaaaagaggacacagagacagacatgcatagagggaagattctatgaagatatttggagaacaccctcttcaagccaaggagggcctcagactgcaagaaacaggacagaggcatagaaaagaactttcctcagccctcagaaggaaccgcctattgtgctgacaccttgacttctgatttctggtctccagaatggaaacaatacatttctgttttttgttttgaaacagggttttgctctgtcgcccaggctggggtgcagtggcatgatctcggctcactgcacctccacctcccaggctcaaatgatcctcccacctcagcctcccaagtagctgggactacaggcgcaggccaccaagcacggctaattttttatttttatttttgaagagacagggtttcgccatgttgcccagcctggtctcgaactcctgggttcaagcgatcctcctgcctcagtctcccaaagtgctggggttacatgtgtgagacaccacacgtggccacatttctgtgttttaagcaactcattctgtgttatgacagccctcagaaacaaatacaagtccccagccgtctgctgtccgccacgcatgcctggccttcgatgggcaacgaggtcccacttttccctctgggacccacctctttcctattgcatgtggctcgtgggaagtcaaccccagtgcccactgcctggcaaagggttcagctcaatgcccagctcctgctaggagtctcgagttttgagtggagggacctggggtgtacaatgctttgtgctgagccattctaatggcagtacccccaaatcctgcttgcacccccacatcctcagatcaccttggttcctaatctacccaaggctgactgtctagcttttgtgttgtcccatgtcctttcaataacaataatgattattctgatttgctaatgttagccagcgctggcttctgttacctgcaacaaaaatccccagttgaccccgtcatgcccttggcctcggctcggttcttcttctctcctgtctaaaagccattaggtggagccaaggaaaacaggcactgttgcagggtggaggtgggcagtgccagtgccggcagcctggcacggaacaccggagcccagcagggtaaaggaaattggtgaaatctggtgtgggattctggagcccagtgagatgaggaggatgcactgggaggtggcaggggcggggctgggtagctgccccagcccagcacagggcattgcaacaaaagcaggaagagcggggagtccagtgtgaaaaagtagtctcagttggatgaggcggtgactgcacggagtggagtaggggtgggaggtggtgctgtgcgggttgtttgatcccaaaggggatatgacccgagagaccaaagttgatgcccctttatcaactaagacggaccctaaggttaaggaaacaaaagttacctatgggtcgagggttcagggcctggctgacacggcaaatttctaaattcctaccattacaagaaaaaccacactcttgctacgctccttaacgataggagctatcgggcaaattatcagctgatttacagatcagatcactacaactctgattggacagaggaccagccttacaaacattctcttctgataagcaacttcaccttaggccagtctcagcagctgatagaggctgtgcacaaactgtctcggcatcttatagttcactttttgatgtaaggggctaaattccatctcgttttaatcctaaaaccccatttcaaagtgaacatgggatatatgttacatacacataccacatactacatcatatacatacatacatacttttcttcttttttttttttttttttttttgagaccaagtctcactctgtcgcccaggctggagtgcagtggtgcgatgtcagctcactgcaacctccgcgtcccagattcaagcaattctccctgcatcagcctcctgagtagctgggattacaggcgcccaccaccatgcccggataatttttgtattctttagtagagatagggttttgccatgttggccaggctggtcttgaactcctgacctcaggtgatccgcccacctcagcctcccaaagtactgggattacaggcgtgagctaccacgcccagcccataaatacttttctaagtgaaagtttacagtgtgttagaagaacatttttctttcctcattgggccctcatagttccatagaaacatccaacaataaaaggcaaattgaatcatgttttctttcaaatgcatcataaactattttccttcagtgaatggaagagtttggcagaggaattttaaagaaaacattgagaagaagttattagaacatgtttctttgtccaataggtgctgaaaggcccgtagagaaatccactcataaccgagtacagtggctcacacatgtaatcccagcactttgggaggctgaggtgggtggattgcttgagcctaggaattcaagaccagcctgggcaacatagtaagatcctatctctaccaaacaaacaaataaaacaaagtattagccgggtgtggtggcatgtgcatgtagtcccagctactcaggaggctgaggtgggaggaacatttgagcccaggaggccgaggctccatgtgagacatgttcgtgccactgcactctagccggggtgacagagtgaaaaaaaaaaaatgagagaaatccatctattgcacatgaactcagctcccctcagaaatatatatcgttttttcctccagcttgctgaatacataggactctattgtgtgatacagaccctgtgaggcataaaacccaacctgccccttccctcattaaagagaggacaccttctgcacatgccagagatggtctcttcccggtttgcaaactgataccatcaataaagctctcctttctacatttatttatttatttatttatttatttgagacagagtcttgctctgtcacccaggctggagcacattggtgtgatcttagctcactgcaacctccgcctcccaggttcaagtggttctcctgcctcagcctcctgcatagctgggattacaggcacgtgccaccacacccggctaatttttgtatttttagtggagacggggtttcaccatgttggccaggctggtcttgaactcctgacctcaggtgatctactgtcatcggcctcccaaagtgctgggattacaggcatgagccacagcgcccatccttctttctactctttagcaatcctggtggtcatttggacgacatggatgaggagggtatctgtgtgggaacaggggcagcaattggttgcatacagaggacttcaatctaatacataaatatatgggtgtaatgagagctgggtttctcacagttaaaaaggggagtttcaaatatagaaagggaggaaaaccctaaaatgaaaccattatgggctgaattctatcctcccaaaattcatgttgatgtcttgaccccaagtatctcagaatgtgagggtatttggagatagagcattgaaaggggtgattagattgaaatgaaataattaggcaggccttaattcaatttgactgatatgcttataagaagagaaggtgaggacaaacagagagaccccagaggcatgcatatacacagggacaaccacgtgaagaggtagcaagagagtggccatatgccagccaaggagagaggcttcaggataaaccaaccctgctggtaccttgatcttggacttccagcctctggaactgtgagaagagaaatgtctgttgtttaagccatgcagtctgtggcattttgttatggcagccctagcaaattaacacagaatcttttaggattagatgaaaattggagttatcagtgtagattcatggttttcaatgtacatataaatagatgtaaaaataaatgtagatagaaatgtgaatgtacatatataaatgtatgcattatgcatatttgcataaatattatacacaaacatacactcatgtatttcctacttctgttcactgagagcccctggaagcagtgactccccaaaagccatgagctcatctagtgtccaaatcttgttttctttcattctttccttttttaagagacagagtcttcctttgtcacccagactggagtgtgttggcaccatcttagctcactgcagccttgacctccaggggctcaagtgatcctcccatctcagcctaccaaagcactgggatgataggtggtatagtttggttgtgcccccacccaaatctcattttgaattttagctcccataatccccaagtgtcatgggagggacgaggcagagataattgaatcatgggggcagtttcccccatcctgtttctgtaatagtgaattagttctcacgtgttctgatgtttttataaggggcttcccccttggctgggcactcattctgtctcctgccgccctgtagggaggtgccttccgccatgattgtaagtttcttgaggtctccccagccatgcagaactgtgagtcagttaaacctctttcctttataaattacccagtcttggatatgtctttattagcagcatgagaacgaactaatacaatagacatgagccaccatacccagaccagatcttgttttctaaatatcagtctccactaaaagagccgagcagggatagtaaagatgagctttaaacatcttcttgtagaagattaagaaagtgcttataggatgatggaggcatgtcaaaaggacacagagcagctcccactgaccacatctggggcaattataaaccactaagaaaaatacaaatccatgagtccatactcctataaataaataattgtggggagaaacagcagaatgcttccctgcagtagaatgccaagtgtataaggaatcatggggtgagaaaatcatcatctcgttacctccacagcaataactaattaatccaagaatcatcaatgtaggcttaaactagtgggtagaggcttgatgaggaacaagatatttagtctcaaaggcacctcctcacaaaatgtttattaattacaaagctaaaaagagtgatttggtagtaaagaggcttggcaggtacagatatgtcttcatcaagttaacatcatcagtaacaggagaaattggaaatgtgtgccatctggtaagaagagcagagcctcacctctcggatattcctgcccaaaatacataacctgaatctaaacacgaggagacatcagtcaaaccaaacgagggacaaacaaactggccggtaatcttcaaaataactacaaaataactacaaaaactggctggtaatctacaaaataactggctggtaatcttcaaaagtaccaaggtcaaggagagactgaaaacagttcagactgaaaactaagagatgtgacaattcaatgcatcacgttttcctagactcaatccttctgctcttgaaacaactaattacattggaatgaggtctaaggagatgctagttatgtatcaatgttaattttctaattttagtcacgtattgtggttatttagtataatctccttgtttgtaagaaatacacattcaaatattagaaagtgggccgggcgcagtggctcacctgtaatcccagccctttgggaggcctaggtgggtggatcacctgaggtcaggagttcgagaccagcctggccaacatggtgaaaccccatctctactaaaaatacaaaaattagttgggcgtggtggtgggcgcctgtaatcccagctactcaggaggctgaggcaggagaatcacttgaacctggcaggtggaggttgtagtgagctgagatagtgccactgcacttcagcctgggtgacagagtgagattcggtctcaaaaaaaaaaaaaaccagaaaaaagccaacaacttattctcatacttttcaagaataagggggtctttgtactatatgtacttgcaacttttatgtaggtttaaaattatttaaaaataaaaattatctttaaaattatctaaaaactatccttagaagatacacagatggcaaataagcatatgaaaggatgttcaatgtcatttgtcattagggaaatgcaaatcaaagcaataatgcgatactactgcacacatattagaatggctaaaatccaaaaaactgacaataccaatggctggtgagagggtgcagagcaatgggaactcatacattgctggtgggattccaaaatgatacagctattttggaagacagattggcagtttcttacaaagctaagcacagttttaccatatgatctagcaatcatgctctgatatggcttggatgtttatcccctccaagtctcatgttcaaatataatcctcaatgttagaggtggggcctgatgggaggtgtttgggtcatggggacagatccatcatgaatggcttggtgccatgcttgcagtaatgagtgagttctcactctgagttcatgtgagatctggttgtttaaaagaatgtggcatctcctccctctctgtcttgctactgctcttaccatgtgacacaccagctccccctttgcttccaccatgattgtaagcttcccgaggccctcaccaggagcagataccagcaccatgcttctcctagagcctgcagaaccacgagccaattaaacctctttctttatacattacccagcctcaggtatttctttacagcaacacaagaatggactaacacaggctgctcagcatttacccaactgatttcaaaacatacgtctgcacaaacgtctgcatgtgaatatttagggtagatgtattcatgatcacccaaaatcataaacaactaagatgttcttcaataagcgaaaggataaagaaacagtggtccgtccattcagtgggatactacttagtgattaaaaaaaaagtgagccatgcaaaaaatatggatgactgttatatgcatattgctaagtgaaagaaaccaatccaaaaaggctatatgctataggatttcatttgtatgacattttgcaaaaggcaaaactttagagacagtaagcagttgccaggggttctaggaaggaggagacttgaatatgtgaagcacaggtggttttttagggtggtgaaactattctgggtaatactgtaatggtggatacattacattgcattatcaaatctgtagacctttacggcacaaagaggaacccttaattatgcaaattttaaaaaatcatttaggaggttggaggatcccaggaagaatgtagatggtaacaaaataatctacctgtattacaagggtatgaaataactttactgaaaaaggtagggtgaaaatagtgctgacctatgtaactatgaagataagtgaagacttaaggcaaaattttctgttggtctacaagtatcctaaatgaaagcattgatttaagattatctttagcatttgaaaagatttggtattctagtagagaaatcatcatcctttaggcccatcagttcctccggtcaccgtgctacacatttgggacgctagtagagggtcttgctagatggcagttatatcaaagagacatgggaacaaactgaaagaacttccaaaggcaaagatgaaacaatttcataaaccaagtaaatgacatagtgttagattataactcaaagtgtattatagatagccatgagtccatactaatataagtaaattattgaataagtaactaaatgggaaatagacaaatttttcatgcaggattctttttttttttttttttgaggcagggtctcactctgttgcccaggctggaatgcagtagtgcagtctcagctcactgcaatcttgtcctccttggctcaagtgctcctcctgcctgagtcccccaagtaactggaaccacaggcacatactaccatgcctgactaatttttgtattttttatagagatagggatttgccatgttgtccaggctggtctcctggagctcaagtgatccacccacctcggcctctcaaagtgctaggattagccccttgtgcggaggggtgaaatgcacttgggaagctctgctagtcagtgagacactgctgttgctgctgcccctggtcctgaagctgtccttcctccctgatgtacttgactaaggcacaagtataatctgctcctccatccctgaatgtggagatgcagtcatggctaagacgcagcctcactcaagaaatccctccagctttgtgtgatgcctgtaaaaaatgttttctgggtgcttcagaagtagactttaagattgctgccctcatgtattttttcctaatattttggcacgtatttgttgctttgcacaatcatctctgaaaatttcatcttttaaactctacctctagagacgcagcaaggcagcagtgtcattggttttctatgtaagaaaatcatctctgtattaaaaaaaataaaatagaccgggtgtggtggctcatgcctgtaatctcagcactttgggaggccaaggcaggagcattgctggagcccaggagttcaagaccatccagggcaacatagtgagaccctgtctctacaaaataataataattattattatttaaaaaaataaaggctgggcacagtggctcatgcctataatacctagcactttgggagcccgaggtgggtggatcacttgaggtcaggaattcacgaccaacctgaccaacatggtgaaaccccatctctactaaaaatacaaaaaattagccagtcatggtggtgggcacctgtaatcccagctactcagggggctgaggcaggagaactgcttgaacccgggaggcagagatggcagtgagccaagatcacgccgttgcactccagcctgggcaagaagagtgaaactccgtccccaaataaaataaaataaaataaaataaaataaaatggagttagtaaccaaccagtgttttctttgaggaaatccagagtaaggcagacacaacatctgtttctgtctcagacctgagctcctacctggtctcagcatggcttgagtcctatggattgccactggaagaagctccagataaaaatagcaaaagaataaagaaatggctcccgacctctggccttcttcaaaagctgatgagctaatggagaaaagctcggcaaaccaaaaacctccatgtgtgcccagttagagaagtggaaggccacctcttggctttagtaggaagcttgtggtggtttccagttcttacagaggagccacattactctcacagcagtattcttaggagtcaaccatggccaatgtcaccctctttttataggggggctgagattgggagggcagacaacctgcccactgccaggcacaggctatacgctgccactactactatcactatgactgctatttctgctactactacacactacggaaaggtggccttatcttctatttaggtttttagactagtcaaatgtactcccagatggatggattgatagaaagtttatattatttatttatttatttttgtagagatgaggttttgctctgttgcccaggctggagtgcagtagcacaatcatggctcacagcagcctcgacctcctaggcccaagcgatcctcccacctcagcctcccaagtagccgggactactggtgcacactaccacatccagctaatttttaagttttttctagagatggagtcttgctacgttgcccaggctggtcttgaactcctaggctcaagcgatcctctctccttggcctcccaaagtgctgggatcacaagtgtgaaccaccacacctggccaatttttttaaaaaacgggctttattttttagagcagttttgggcttgtagataaattaagtggaaaatacatacagttctcatatactccctcaccctcgcagtttcccctactactaacatactgcaacagtggctacatttgttggaattcatgagccaatattggtacattgtttacttcatttgttagaattcacagctcatattgatacattgatattaacaaaaatccatagtttacattagggttgactctgtgttgtacattctatgggttttcacatgtatccaccattatagtatcatacagaatagtttcactgctctaaccagcccccttcgtttctccctcactctctcttcctgtgaacaactgaaacattgatctttttactgtctccatagttttgcttttcccaaaatgtcatgcagttggaatcatacaatatgtacattttcaagttggcttctgtattagtcccttctcacactgctaataaagacatacctgagactgggtaatttataaaggaaaggggtttaatggactcacaattccacatggctggggaggcctcacaatcatggtgaaaggcaaaggagaggcaaagtcacatcttacatggcgccaggcaagagagcatgttcaggggaactcccatttataaaaccatcagatctcgtgagaactcattcactatcacgagaagaggatggggaaaactgcctccatgactcaattatctccacctggtccctcccatgacatgtggggattatgggaactacaattcaagatgagatttgagtggggacacagccaaaccatatcaacttctttcacttagaaataggcacttaagattcctccatgtcttttcatggctcgatagttcatttctttttattgctatataatattccattgtgtggttatacctcagtttgtttaaccattcaacctattgaaggataccttggttgtatctgagttctcccaattatgaatgaagctactataaacattcatgggcaagtttttgtgtggatgtaagtttccaactcatttggataaattacaaggagcaaattgctgaatcctgtggtgagagtatatttagtttgcattcccaccggaaatgaatgagagttccattgctccccattctcatcagcatttggtgttgttcgtgtcttgtgtttagccatcctaatggatgtgtagtgtagtgcactgctgtttagatgtgcaattctctgatgacatgaggttgagcatctttttgatatcttcttttgctttattttaacaagatgtctgttaaggtcttttatccatttttaaattgggttgttttcttattgttatttttaagaggttttttggggtgtgtgtgtgtgtatgtgtgtgtgtgtttgtattttttaatttttttagacagagtcttactctgttgcccaggctggagtgcagtggtgcgatctcggctcactacaacctccacctcccacgttcaagcaattctcctccctcagccttctgactagctgggattacaggtgtgagacaccatgcccagctaatttttgtatctttagcagagatggggtttcatcattttggccaggctggtcttgaactgctgacctcaagtgatctgccttggcctcccaaagtgctgggattacaggcatgagccaccacacccagcatttcttttttttttttttttttttttggaattctttctttaaaagatcacatttttggtgttgtatctaaaaggtcattgccaaactcaaggcacctgattttctttttcgttatcttctagttttactgtcttgcctcttacatttaggtttttttaattgcaaacctcaagggtggaaccagactatcaacatttggaatacttgaagtgaaaataataaataataatggaaggctggggttgaaaacacaagcatggcaggcgagatccaattctgctgggaagatggcaagcttctcttttacaaggagataccagggatttctcccctaaggatacactgcttcccctcatctttcctgattcctttccagccacacagggatctgatcttatcaaggggagagatagggacggacatattcctgcttgggagctatgggtctccatcatcagagccatttccacccttacaaggaagggcaagtgaatagatctggccccacaagcaagaaggaaaatccattctgctgctcaggtcatagatggggagctgagaagaaaataaacggtgagtgagaatttggaattattacttctttttggttaattttttttctgctgctgtattgtgtctttgcatctgattccaagaaaaggattgaccccaaggtggaggtggggcatccatacagatgacatcactatcactgcatgactgctttgctcagagctgggagctgggaaagggatgctgccaagtctggcaatggaggctggagcttcacaaggggagttttcctggtggatgtcagccttgagaaaagccctcctggggctggggctgggtcttttcttctccaagtcagtcccaaatccttttaggagaaaacacaccctccatttggaatgtactgagaagtagaattgaaaggtctgggtgagggataggaggaaggatgaatggaggagggccagggaggactcccgggcttctggcatctctccaatgaggaggggaatccagggatcactgtttaaatgtgcaaagtctaggccaggcatggtggcttatacctgtaattccaacgttttgtgaggctgaggcaagaggatggcttgaggccaggagttcgagaccagactgggcaacaaagcgagaccccatctgtactaaaataaaacaataacaaaaaattagccaagcctggttgcacacacctgtagtcccagctactcaggaggctgaggtgagaggatcacttgagcccaggaggtggaggctacagtgcgctatgattgcattactgcactctagactgggtaacagagcaagaccctgtcgcaagataaatacttaaataaataaatgtgcttagtctaaagggctgctgggatgtctgaaaagcaatggatgccttgtagagagcccactaaatgggcacaagggttttctgttttctgggggtacccagggttctagctggaaagggacaggcttggagataagtggccctgcaaagactcttctccttttccaaccttagtattaaaatccctttgatggtccagtgggccttaggccaaaggaagaaaagagtttatgaaaaaccattcaaagaactaaaaataacttgctcatttctcggctagactggctttgttcaagtcttagaaaaggcaaggaaaaaaaaaaacttgagagcaaaaaatccatggcaacaagcatcttctgtttatggatagcatcccagggaaattaagtgtctggctgctagagagtagaagcgaagtcaaagtcatctgtatctgtttacttttctcagattgagcgaactgaaagcccatacctgttctatatctccaccagaagtaaatacttgtatttttgtttgacaagacataagcccaattgtttcaggagttttgaataaagatgataacatatcattatgattgttggatgacagactggctttccatagcatggattgccaagaagggagggcaaaatgaaataagtgggtgttggtaggtataggttctaatttctagtaaaaatcactattgtgttttcatttaaactgttgactgtttttacttctttgattctctttttaaaatttataattaatttcaaacccacaaagtaaactgaaccatcctcaattatctctaaataaggtaaacatttttattttattttattttatattcattttagagatgaggtctctctatgttgcccagcctggaatgccatgtctattctcagaaggaatcacacttccttttttttttttttcctttcttttttttgagacggagtctcgctctgttgcccaggctggagtacagcagcacgatctcggctcacagcagcctcggcctccagggttcaagcgattctcatgcctcagccacctgagtagatgggactacaggcacctgccaccaagcccggctaattttttgtagttttagtagagacggggtttcactgtgttagccaggatggtctcgatctcctgacctcatgatctgcacgcctctgcctcccaaagtgctgggattacaggagtgagccaccgcgcccggccgagcaatcacacttctgatcaccacaggagttttgacctgctccttttccaacctgggccagttcaccccttcttaggcaacctggtggccccctgctcctgggaggtcctatattgatgccaaacatagcgcgcaacagcccagaactcccggacttcagcaatccttttgtcttagcctccaaatagctgggactgcaggtgtgcaccacagcacccagccatacttattttagaatttatttcatgtgttctattatttcagttcttcaaatgcaaattcttcacttgttgcacaccctctcacacatgttatttattactgtgaagtcaacttcaggaaggggttttctgagagtcttatgtgcttgacctgcaaaagtcacataactgaagcccctgctggtggtttattctcacccaagactctggacccagctctcatctctaaccagaatcacccccaggatccggcacagacaccatttacaggtgtgtatgtcagagctcatctctcagacaggctcaggtccagagagaaaaccaacaaataccgcaggtgaccccaggtgtttttgaagtcattaccccctccctgagctctggtgcctgtcctgaaactccttttgcaaatgaagacatttacatttcatgtcctctgcatcctcctgccagggccttcggctgatcaatacttttagctgacaatattccccacaagctaaagaaatggctctctcaccatagagatgaacagaggcttcttcatgggtttactggtgatatcaagtttccattttacagccttgtgaaagcatttagaaaaccatgattcctaagtagtgtgaatagaaaggaacctatttgttatgctgatgtatcctcctctatagactcagggatagcctgactttagccatgcacaccacactttctttgctgccgtgtgtgggacccaggtaagaaggctaaagagatggctgacacagaggtgaaggagggaagaaccactagaaacctcggagttggtgcaagaggcaagatacaaagagaaggaaccagaccagccacccaggattactgaatgatgattacagaagcccagaataggaaggcacccgggaggctagaggacggaatttggaggctgggcacaaggttgtgggcaggtgtgcaggtgtgtgggtatgcaggtgtgcagttgtgcaaatgtgcaggcgtgtagttgtggaggtatgcaggtgtgcaagagtgcaggtgtgcaagtgtgcaagtgtgcagttaagcaggtgtgtaaatgtgcaggtgtgccgatgtgcaattttgcaagtgtgcagttgaggtgtgcaggtgtgcagttgtgtgaatgtgcaggtgtgtgagcatgcaggtatgcaattgtgcaagtgtgcaggtgtgcgagtgtgcaggtatacaggtgtgcaggtgtacaagggggagcatgggagacaggctaacctctctgaggcctcgttatctgacaaggtcaaggttccagcattggccaagaggttgccatcactgcagccccctcattgtggggaatcctggggctctgggaccacagttggatctccatcagccctgctgatggactacattggctgaagggaatgcctggaactagaagacatttccaggctctgcaatacagcagcccaggaaaactagaggctcctcaatgaggagaagcagctaagcccagccctgccagggtcctgtgcctgctctgctcagtgagtgccccctctcagggatgatctggtcctaacctcttgggtcattttggtgaaatgagagttcattcctgcagaggtcaggccagaaaagagagggggaacaaaattccagagacaggaagagtggtggagtgacaaagggccctgtaagaccccaccacccgaaaaggaccctgcctgctgccaaacggcagattggtgagcaagtggtttcttgcagggcatctataagtcaggagcgggtgactggaggtgcacctgacaaacacacccagcctgagatacccagatatgaggatgtgaggtagggctttcctaacaccggctgcctctgagccctccaggtctaatcagttatccaaataccgaacctgctcaaatggcatggtttccacctgggccaggggccgcacggggtaaaggcgtagcatgtatctgctgttcattctgttattcaaccaacatttgcagagagtctttcaaggggcggcacagttctattaatttttttatctttatttatttagagacagggcctccctctgtcacccaggctggaatgcagtggtgtaatcatagctcactgcagcctcaaactcctggtctcaagcaatcctctcaactcaacctcctgaatagctgggactacaggtgcacatcaccacatctggctaatttttttcatcttttgtagagatgagctttcaccatgttgcccaggctagtctcaagctcctggcctcaagcaactctactgtctcagcctcccaaaatgctgggattacaggcatgagccactgcaccagcagggcatggttctggggttcagtgtgaatgagacagattaagacaccgacccgtcctcatgaagcttacattcaggcaggagagacaatacaataacaaataaacaagaccatttcagagatccttctgaatgctaaaaagaaaataataaatgttattaatagtggcatataaagtgacatgggggtggaggtggggcagagttggtaaatgggaaaagtgcctcacacaaggtggtttggagctgtgatctgaatgacaaggagaagccaactgtgaagatgagagggaagaagtttccaggtagagtcacagcccatgcaaaggccctgaggcaagaaagggcttgaggagttccaaggactggcagaggccagggtggctgcagccttggggaaggaggaggagcggggatctaagagctgccgaggagaggaaggccttgggctgtggctacagctcaagcctactctgggtgcagtgggaaaccgttaaccaggtttaaattgggagtgatgtgatcaagtcatctttttaaaattattttttgttttattattatatatttttagagacagggtctcactttgccacacaggctggagtgcagtggtgcaatcatagctcactgcagcctccaactcttgggctcaacagatcctcccttctcagcctccggcctacagacacacgccaccacacccggataattttttaaaaaattttaagagacagggtctcgctgtgttgcccaagctggtctcaaactcctgagctcggctgggcgtggtggctcatgcctgtaatcccagcactctggaaggccgaggcagaaggatcacaaggtcgggagatcgagaccatcctggctaacacgatgaaaccccatctctactaacaatataaaaaattagccgggcgtggtggtgggcgactgtcgtcccagctactcgggaggctgaggcaagagaatagcgtgaacctgggaggcggagcttgcagtgagccaagatcatgccactgcactccagcctgggcgacagagcgatgctcttgtctcaaaaaaaaaaaaaaaaaaaaaatcaaactcctgagcttgagcaatcctcccacctcaacttcccaagttgctgggacacaggtgtgagccactgtgcctggccatcaaatcatcttttaggaagtcctctctggctttgtatgaagagtgggctacaggggacgagagaatggcaggacaccaggtacagggcaccaggtgggactctgtagcgttagtccaggagaaaggggatgcaggctgagctaggatgggagggacagctcgcatccctctcctggagtacttcccaaactgatttaatgacagaacgctttcaccctggtgctgccttccagctgtccctgcagcatggcaagaaggagtttgctctgctcacttcagctaaattcttcttcacaaaagcatctcctttgctggtcttgcctctgccagttggtctaggcataagcctatgtgctgtgtttacttaattacagaaaacaattattctggaatcttgggacacttaggcactgactttacctttcttaacataaggactcagaaaagaatttagaaaatgaaccaaccccctaatcagatgcctgaccaaatgtcctggaggatgctggaaatggggataacattttctttccttttcttttcttttttgagacacagtgtcactctgccgcccaggctggagtgtggtggcacgatcttggttcactgggacctctgcttcccaggttcaagtgattctcatgcttcagcttcctaagtagctggattacaggcagccgccaccacgtctggctaatttttttttttttttttttttttttttttagtagagacggggtttcaccatatcggccaggctggttctcaaactcctgacctcaagtgacccacctgcctcggcctcccaaagtgctggaattacagacattagccactgcacctgaccaggataacattttctgtccatgagcagacccttgttttttctcttgagtctttttttggggggtggtgcggggaatatcattaggatgggcaaaactctgtaaaagtgatgttagcacagagattcaatggtgactttaagtgcaaattatatactttaaaaatacaagccattattctaatcaaaataattgctcatactatatgtgtgaagacaggtgaaattcaagagatacagtttgcctgtggtgggatcaattatcagaactcactacgctacagtgcacttcttttattaccaggagcaatagattttgcactaaagattctcacttaaatcctactgctatgcatcatctgcaaaacatgacactaatgtaagcatcttagaaaacacttacatgtacacacgtaaatagtgggaaaatcaactaaactgaaatcagcaaagttgttgctcttcagggagtgaacaaaaggtagctctgcgaacaaaggtacattggcaccttcaacagttaaatggcttaccatcccaaactgaacgcaggactaatgtggaatgatgtcacggggccccacaaccatggcagctccttggattctggctccaggctcagatctgctgctgagcccaggaatacattttattttatttcatttcatttcattttcatttcatttcatttgtttttaattgaggcatggtctccctctgtcacacagactggggtgcagtggcaacatcttacctcactgcaacctccacctcccacgttcaagcaatactcccacctcagccacccaagtagctgggaccacaggcatgcctcaccgcacctggctaatttttttttctttttttggtggagacagggtctcaccatgttgcccaggctggtctcaaactcctgacttcaagtgatccgcctgcctcggcatcccaaagtgctgggattactggcgtgagccaccgcgcccggccccagggacatgttttagagcccatctgacagcacacaaaacatatctcacacttccagattgaatggaatttgagagttaaatcaattgccttaaactgtaatcctgcaatgtaccataactgaaatattgtgaaataggctgtgcttgaataactgaagcctgctagaatttacacattaaaacccaattatgacaactggaaaggcctgtctactacttcagccccgacctgtgacaaatataatctcttgttctatcaataaaaggagaggacaaaggaggcatgtgagcatgtggcacttggtttttctgcttgttttttgttgttgttgttgttgttttgttgttttttgttttttgtttttaagatagagtcttgctcctttgtcgcccaggttagagtgcagtggctcaatcatagctcactgcagcctccagctcctgggctcaagcaatcctcctgctcaatctcctgagcagctggaactatagacattccacacctctggttaattttttgatatttttgtttcaccatgtggcccaggccagtcttgaactgctgagctcaagtaatcctcccactttggtctcccaaagcattgggattacaggtgtaggccaccgtgcccagccagtttttgctgtgtttctaaacacagcatctcctgctgccaaacaggagatgatgtttaggcacaggacctagaagatattgtgcatccagacaggcactcatctttccacccagaaaaaagagctcaagtgagttcagttcacagcctttcaagggaaggaggctgtcgatgctgtttggttcttcctctgtgcatcatctgagccagctcttgtttctgcatctgtagcaaagagagagagttgtcctctgaattccctttccacattgttatgactcttcgcaagcatgagcctatgacccatggggagaatgcaacctttgcccacactttccagagactgcaagcagcatgccaagacagtgccctgcttgagactgtgtgtgtgattttagatcttaaactcttgatgatggctttcatttctgggtaaaactgatgctttcctaagaattccaatagctgcagcaccacagagagatgttcaacagataaagagctggtcaaaatgggataaggcttagcttgctggcttatctcacttcatccctcgccaggtttcctcctctattcctgggacttcaggtgtgtccaggagccacagggaactctcgtgggttggcagggagacataatttccctggggaacagcacagggagactgtctataaggggataggcagaagctctggagcagggacaaggttagtgctgtctgggttttgagcaggtgcctttgctgctgagaccaggacagaggtggggttggacagaggtggccaagggaaggtggaggggtgatggcagggtgttctggggcactgcgtgggtagcagcttgtgctccagcgtcgagtagggtcagtcccagtgagactggcctggctggaaagggaagaggggaggtacagagaaaaacagtgggtgccaaggctggacttaggtattctcaaagaacccaaagagagtgttagtagaagacagcccaaagaccactgcccagaaggaaatatttttgctgttgtatagaatacggctctggaaaaacaaggctgacaaggatgtatttgaatggcatgatcacaccctgaccacagacaaagataacaagctaattcctaagagctgcagttggagaaactgaggcaggatccatggtcacagcacgggatgctgtgctgcactctacagctcttagtactacatggccttctactgctgtcaggtggtgcatgtgtgattctgagtggggctaggggaaacagccttccctacccctcacccctgaaatgaggactcccgtgcttctctgggggagctctgcagcagggttcagcagctgccctgaagtgacaccagggtcctagtggctcagacacactgcagctggctctaccctgaatcagaaaacccagctctgaggatgacttgagcagttaaatgaaagcttatgtcaagtctcggtcccaacttctcctggaagaatctcctggaacttctcctggaagaattaccctgcagttttctcaggcttcagaatctaaagcttctcatttgagatcaaatccaatgactccaaacaaatcaaaaccaaagaagtcttctttctggctaataacaatttttgcgtgcaggtctaaaacttcctgggagcttctgaattcagccttcccctccctgggcaccaattcagcaggggcaggtatagcgctgtcaatgggctccaaagcaaacagacacccacaggacccaggaatcagacaaaagaaagggggcatgcgggacatgcagggaatgttcatgggacagggaagaagtccacaagccctttctctcccggcagctcgttgtcggatttcacctggaatatctttggcctacatccagattaaatgccagttagaaagctctgcccacccgacttttcggggcagacagcaacgatggtgagctctaatcatttacaaaggtcatgatccagagcgagccgcggagcagtcatttaaaattcgattgatccctatttgtagtcagggaaagaaaatgggcacttggactgtattgtaattatgaggcttccaggcaaccataaatagatgtgcaatctcagtactggaaaatatctggaagaagaaattattactctggcatggtacgttgctaggaaaggttgaagacaaaattgcgcataaaaaaatcaatcatcttttagctaatttgcttctctcgccactcatcggggttatcacaattatcagatgtctgccgaatatattatgaggaggatctgctggctgaaaatgatcttcaagaaagcaaaggcctcaaatttggtggggactctggagagctggcatttggggctgggtgggctccaggggccacgagcataagggaagagccttggggtggctcttttggagcctcttgctaagggataggtttccagagttcttgagagcatcagccctgtgtaggcactgcaaataccatctcgatgtccaccctgctggggaaatcagtctgggaagaggaggatctgctcattctgtgagtggcagaagatcaagtggccggcacatcctctgctgcttagtcccatggggctggccctggtacttgacattcataaccttaaccttaaccacacccccgggaatgagtattaccaaccccctattactgatggggaaactgaggaacagcaagattcagaagtgtgcccaagatcacctggaggcatgtggcagagctaagcccagagccacctggaggtggggaccaggggacctggaggtcccaccttgttccaggcagggccacgccagtccagtgcttttagaagaggcgaaggcaggggtgcccactctccacctctgcctctgcctctcttccatgcccctgaagaatctctcccttcgaatccttaggaaccttcaaggctctaggcaaaaacaatgcttgctggatggcaaatgttccccacgggggctggcgagccttctgagtctacttcctgagcctgccatagtccagagggctggccctggttctgtgtggggaggatctctgaccctgactccatggggtcaccccaccttctgagctggtgcttccagcaccttgacatcccagaagccccatgatggcctccagtgggatcaacagagcactctcaggaatgatgccaattaaatcaaggtccccttttctctacacggaaccagccaacaccagccagcagtgccagaccgtgagctgggccaggcaatccccagccaggcaagggtgacaaagaggacagcccacctgggaatcacctgccaccacggaactagcatctaaaggagcgtaatatactcatgtcattctttttaaattttttcttattttttaaaaataattgagatggggtcttcctgtgttgcccaggctggtcttgaactcctgggctcaagtaatccacccgccttggcctcccaaagtgctgggattacagacgtgaaccacagcaactgctcatactgaagtaattctacttctacaaatctatcccagggaaacagggtgtagacagagatgtatgcatggagatgttgatcccaatgtcattcaacaatggcaaagaatgtaagtattcaccactggggactggttggatgaagtaaggcctacgaattgtgtagatattacaccaccattgcaaggctttatatagagtttctagtgctgcgagaaatgtttatgaaagaaggctaaacaactaccgcaacaacaaaaaaaaggaataaaattatatggaaccttgtggaggatgagtgaatggataactatgaagattactagtgatgaggttccactttcctattttttggttcttttcaaaattgtctgaagttcaaatcgaaaccacaatgcaataccactttactcctgcaagaatggccataataaaaaaaaattaaaaaacaatagatgttggcatggatgtggtgaacagggaacacgtctgcactgctggtgggaatgtcaactagtacaaccactgtggaagacagcgtggagattccttaaagaactaaaagtagaactaccgtttgatccagcaatcctactactgggtatctacccagaggaaaagaaggatcatacaaaaaagatatttgcacatacatgtttatagcagcacaattcgcaattgcaaaaacgtggaacgaacccaaatgcccatcaattaatgagtggataaataaactgtggtataaatatacaatggaatactactcagtcataaaaaggaatgaattaatggcattcacagcaacctggatgggattagaggctattattctaagtgaagtaattcaggaatggaaaaccaaacatatgttctaagtgggagctaaactatgaggatgcaaatgtataagaataacacaatagactttagggactcagggggaaagagtgggaaggcggtgagggataaaacactacaaataaagttcagtgtatactgctcaggtgatgggtgcaccaatatctcacaaatcaccactgaagaacttactcatgtagccaaacaccacctgttcccccaaaacctatggaaataaaataaataaaacataaaaataaatttttaaaaattgtctacaattagctaccatccttctcttcccaaatcttgtggccttggagtggtggctgggatcctggcctgccatcctgggtcatccatgccaacagcaactcaggaaccccaaatttgggtttaccagaaggagctggtcttttttaaaaaaattgtgacaaaatttaccctttcaaccatttttaagtgtaaaatccggtggcactaagtatattcgcaatgttatgcaaccatcaccactatctatcttcaaaacttcatctccttaaccagaaactctgtgctagttaaacaataatgctctgttccccctccccagccccaggcacccccattctgcctcctgtccctgtgatttgcccagtcccgcacctcctacaaatggaatcacacagtctttgtccttctgtgtctggctcttgcacatagcatggtgtctccaagatttgtcccaccccgtccctacctccatttaattctcattaaattcaggacgggcagggctgttcccacttaacagtgggagaaactgaggctcacgaaggttgagccaggacttgttctcagtttgaccctgagtccatctcttgctgcagccgcggagacctgctgagcacgttccagagttaggcgaggaaggagccgtggtgggtgtggcctctccagtcgtgtcacctgtgccgagctgagtgtttgcacgtccctccaccccgactcctgagaataaacagtccattcgccctaaagctttcctgaggtcacaaaggtcttgggcaagactcccagcttttctgggcagctgggccccagctggttccttcccagagcccggctctgacaccctgcccactcaatcctgcttcccaccctcagggaggcagacgcgggcagacgtccttgccctcacattggcccactgccctccccatgttcttccctctctcagcagcatctcgaggcccctcgaaggtgtcagacccagatggctgacctcctgtacatggggagggctgggctgcagccctggggcccctcgacagccaccttcacccaaggttaccaaagtgctgtgcacactcacccaagggtcccagccagccgccatagcaagcagaacagcttctgtgcagcccccgtcaggagccaccttgaatcttccttcaaaccagtcctccaaagggacctggtgacgctgggccccaggggctcactgtccccagaaacaggccttctcccagtcctggctgtttccacccaccctgggaagcacccccactctgaacactctatcatagcaatgggggactttgtgaaaattgtatccctagtaaagataccttctccacaaccgaatcagaacagttcagtaatgggtagagtccccttaaacaagtataatacctgctaacaatgctcacctcacattacctgtgaggtaagcaattatcaattttccactctatttccacaacacattacattactactgaggcacatataccttagaaatgatcatttcctctttctctctcaggtgtctctttctctcttttattattattattattttagagacagagtctcgctgtgttgcccagagtggtgtgcagcagtgcaatcacagctcactgcagccttgaattcctgggctcaagtgatcctcccagctaaacctcccaagtagctggactacaggcgctcgccagtaggccttgctaattttgtttttacttttgtagagatggggatctcactgtgttgcccaggctgggcttgaactcccagcctcaagcgatcctcctgcctcagcctcccaaaatgccaggactacaggtgcacatcaccatgcctagccttgcatatcattttagtcctgtagtgattaagccaaaaatccagacaggtggtccctgtgatactgtgatgcttgcctttgctccaatctctcccagcatccccagcttggacagccgcgggagtctcttcaccagcctccctgcctttccccttgccccctttgaaaactatccccctcacaaaagcctcccaaagcgctgggattacagatgtgagccactgcgctcagccagctttgtcctttgataacctctgtatcttcagggactatgacagattaggtgctcaacaatgtttgttgactgactgatggaatagttgtttttttgttgttgttttttttttttgagacggagtcttgctctgtcacccaggctggagtgcagtggcacgatcttggctcactgcaagctccacctcccaggttcacgcccttctcctgcctcagccccccaagtagctgggactacaggcacctgccaccacacccaactaattttttgtatttttagtagagacgggtttcactgtgttagccaggatggtctcgatctcctgaccttgtgatcctcccgcctcggcctcccaaagtgctgggattacaggcgtgagccactccacccagcctagtcggggtttttttaagtccacattttatccaaggctccccttggcctctgccccatccttctgctcaaaggagttgtcctcactatcttagtccattttgtgttgctataaaggaacacctgagactgggtaatttctaaagaaaagaggtttatctggctcacacttctgcagactgtacgagaagcatggtgctgacatctgctaccagtggggcctcagggtgcttccaatcatggcagaaggggaaggggagctgtgtgtcaactggtgagagaaggaacacaagagagagaaggtgctagggtctttttaaccatcagatttcgtggtaactaatagagtgagaactcactcattaccaagccattcatgacagatccatggccatggcccaaacatcttccaccaggccccacctccaacattgcggattacgtctcaacatgagattcagagaggacaaaacattcaaaccatgtcacttattgtcttacccgttctgaaggctcccaaagcttctgctgtgtcctgggtcaacctgcccggaccccccaggggatgcaaatacaacccattgctgactcagcattgtctcttgggcccctgctcttgtcactgggtttctcccccaagtacttgcccaagccagaaactcaggagcctgaagcaggtgcaatttttttttctttttctttgagacagggtctcgctctgtcacccaggctggagtgtagtggtgcaatcacagctcactgcagcctcaaccttccaagcccaagcagtcctcccaccttggcctcccaagtagctgggaccacaggcacatgccaccacacctggataatttttgcttttatagagatggggtctccctatgttgcccaggctgttctcaaactcttgagctcaagcaaccctcctgccccaacctcccaaaatgctgggatgacaggcatgagtcaccgtgcctggtctcagatgcattttgtgtcccccgcttcttgtcctttcgagagacaatttggaggcgtgtttcacatggagtcccctgcagggctgcaggctccagcgcaattgcccacctttacaggggtctcttccctgccttgctctctctgtgttctctctctgggctcccctccaacacccgcagttgagtctccgactcactttccagggcacccactgtgatgtccccctggatgcttcctttcaccaggcacaaccagttggtccccagtctggtggattccacccctaagtctttctgacactgtctgaattcattttctgtgtctgctgtaactaattaccaccaactcaatggcttaagacagcagaaatggactctctcacagttctggaggccaaaaattcagtatctgtgggctggaatcaacacgttggcaggctctggaggagaatctgttccgtgccttttccagttctatattccttggctggtggccacatcactcctgtctttgctttcatggtcacagcgccttctcctcttctgtccgcatcaaatctccctctgcctccttagaaggacatgggtgattgcatttagcactcatctgcatgatccaggagatgctcctcatctcaagagcctcaacttcatcacatctacaaagtcccttttttttttttttttcgcccaggctggagtgcagtggtgtgatctcggctcactgcaagctccgcctcccgggttcatgccattctcctgcctcagcctcccgaatagctgggactacaggcacccgccaccacgcccggctaattttttttgtatttttagtagagacggggtttcactgtgttagccaggttggtctcgatctcctgacctcgtgatccgcccactttggcctcccaaagtgctgggattacaggcgtgagccaccgcacctggctttttttttaatttttttttttattttttgaaatagtctcactccgtcacccaggctggagtgcagtggtgctatcttggctcactgtaacttctgtctcccgggttcaagcgattcttctgcctcagtctcctgagtaactgggattacaggcatgcaccaccacacccagctaatttttgtatttttagtagagagggggtttcatcatgttggccaggctggtctcgaactcctgacctcaagtgatctacctgccttggcctcccaaagtgctggaattacaggcatgagccactgcacctggccctccttttttttttctatataaggtaaccttcatagattccaaggattaggacctgatatctttgggaagcattattcggccgccacatgtcccaccgtcactcccctgcccccaactatcatgaacgacctcctgtttggccccatcaaatcccagctataatcagagacatctttctgaaggcaaatctgctccagtagctccacactcaaagccctcgtctggctttctgctgcctgcaggacatggagcccacggcctagccaggccccactccctctctgcaccagcctctcccaccacagctcccagtgcctcgagggaccaggaaggctctgctgccccgtgcatgtgcaaggtggggggcacagctccagctgactgcaatcaagtgggaatgcagatgcaggagttttaagagaacccagaaatccaggtttggtttgcttttagttttagtgtgaaaactgtctgtatttatattctgacatctaaagaagaaaatgtgacatagcacaggccacacaaagcagtcttccatctgcccctttgcaacctctgcaggagcgtgtggctcccttccgtcactcagcctctgcctgctctcaccccttgctagaaacaccccctggccctgtcctctaccccctaatatgccccttgcctaatgagccctaactctcccttgtcctctgcgtggatgccatcttcctgaagactgaccaaggtattctcatgggctgactcccatcctggctcacatcaccccgaagagatgacacctacccagggtctctgtctcccacaagaccgggagcacctgcagggcaaggatctatgcccccacagcctggtacagatatttgcagaattatgaatatagttctctcccttaggaaaacaccaaacattttattttcagggtgtagccacaaagttaccaaatttggaagcaaaaacatgagttaaagttcttccaaaatgaattcttaaacttagacttaagaactgttggctactcttgcaaaagaccaataggaaagatgagagtctgcctgcactttttgggcagagtcgctattcactgactgtcaggatttgctgccagcacttggaaggcccaccaagccttccgtagtttggatatctgcatccgtttgcactccgctgtacagccccatgaagaatagagtccagcagcaccactgctcttgggctcttgggttgacagactcttatccaagtcttttttttttttgtagatggagtccggctctattgcccaggttggagtgcagtggcacaatctcggctcactgcaacctccgcatcccaggttcaagtgattctcccggctcagctcccccgagtagctgggactacaggcatgcaccagcacgcccggctaatttttgtatttttagtacaggcagggtttcaccatgttggccagctggtctcaaactcctgacctcaagtgatgcacctatcttggcctcccaaagtgctgggattacaggcatgagccactgcacccagccaactcttatccaagtctatcaacaccatggtagccaacattaaccattcttatgagtgtaaatgacacttatctgccttgtgtgcaataccttgaacctacctggcatcatggcatcccaacccacctattgcagaggaggtgaacatcaccaccttaggagaagcaagcagctagaagtttacaacactggtattcattatgactgcaaaggaataccatcaaatttagaatgcttcctgactccccatcccccaaaacttccattgaaagagttaattttacaataaccatcacaaaggactgaagcagaagtccagcaattaaagtataaaatcaattagcatagaagcagagcctggtataggtgaatttggaggcacaaatttgaccaaaacaagcgggaacagttgctttggaaagagtctgacaactttgcactttccacattgtctgccattaacatgcagtacctttataatcaagcaaatggtgaaatatttaagtgtctggagaaacagttattcagttagcagaagcctcccaacagcccacggagctgctggactccgggagcagcagagggatggggcgagcctttgccctgcagggggcacagcgcggacttgggaggcaaaagcaccaatgtgtggtgcttagatacctcccaccccagaggcagctggtggtgtgaggaccgtctggggcggggccataagcacagctccaggtccagagacggatatgggggtgggggtgtcggagagggcctcatttctaggagtaaatcttgagaggctttcagttgcttgcttgctttatttatttatttatttatttatttatttatttatttattttgagacagagtctcgctctgttgaccaggctggtgtgcagtggcacgatctcaactcactgcaacctcagcctcccacattgaagcgactctcgtgctttagcctcccgaagagctgggattacaggcacccgccaccacacctggctaatttttgtatttttagcagagacagggttttgtcatgttgcccagggcggtctcgaactcccgagctcaagatatccgcccaccttggcctcccaaagtgctgggattataggcgtgaggcaccgcgcccagccatcagctgctattttaataccgcttttatttcactgtggtttttttttttttcatttcacctcttcactttcttgtaactcatgctactgaagcaaattacttgctaaagaaacacagcctagcatcgaggcattctttaaatgcagcgagacacaggttttaggctgagtaccaatcccctggaagaggccccagccacatgacccttctggaggtgcttctctgaggtgccctggggctgtgagtgatcgtgtcagtgcccggcatgctgcctggcatacataggtgatggctgaatgaatcttgaaggattagagatgctacattttgggtatttgaccttccaaacctcatgttgaaatgtgatccccaatgctggaggtggggcctggagggaggtgtttgggtcatgggggcagacccctcatggatagatgaatgcgctcccagagtggtgagcgagttctcactcttcttagttcctgagagagctgggatcatttgaggtcaggagttcaagaccagcccggcctactaaaaatacaaaaattagctgggcatggtggcaggcgcctgtaatcccagctacttgggagactaaggcaggagaatcacttgaacgcaggaggcagagattgcagtgagccgagatcacaccactgcacttcagcctgggcaacagagcgagactccatccccccaaagaaacctcaaaacaaacaaacaaacaaaaaatactaacatctttcccctctctctcccttcttctcttgccctatgatctctgcacaccagctcctctttcccttccaccatgggtggaagcttcttaaaggcctcaccagaagcaaatgctggcaccatgcttcttatacaagctgcagaaccgtgagtcaaataaacctcttttttttttttttttttttttaagagacagtgtcttgctcttttgccccagctagagtacagtagcgggatcatagctcattgtagcttccacctcctgggctcaagcaatcctcctgcctcagcctcccaactagctgagcctacgggtgtgcaccaccatgcccagctaattttgtttttacttttgtagagatgggggtcctgctatgttgcccaggctggtctggaattcctggcctcaagcgatcctcctgacttggcctggaaaagtgctgggattataggcgtgagccaccacacccagctctcttttctttaaaaatgacccaaactcagatatttgtttatagcaacataaacagactaagacaacagattatatccaagcttcttctctaactgaaaacagcaaagcttaatgctggttgtgaccaccatggagacagagtagagccttgacctctctcgacctttcccagggagaagagactaagcagattatttgagggctgctggcatccactaagtcaatatttagacatcatattgagcctctctgtgtgatctggaaagctccctccacagacaggacttgtctgaaaaggagaaggtggtttcactcccatggaggtgccccaggggtccctgagttagaaaggggcctggctctgtgtccctggcagcctctccctcatgcctggtacaagctggaccagtcaccataacaaagagggacttgctttaaaaaaagaaaaaaaaaaaggtgggagacacaccatatgaaattgatggggatgccacagtttgcaactgccatttcacaaccactttagaagaagcagtgtgttctggtggtaatgaattcatcatcgtattcagcaccacttggacagtgggtgggaatgtggctggattttccatttccatggctgtaaaccagtaagctgtgaagcaggaagtctcacatagctacaagatgcaactgctagactctagaatagaagggtattaattcactattatgctgtctcctgagctggaagcttcctcgtggatagccctcacctctcaccactcagagacctcagaatcttccctcaggctgtgctggttcaggccctggtgagatcttgcctggttggtaaaatagcctctaccatggcattgcacaaagccttagaaaataatgtgaaaagcgcccctagcgttgtacagctgcagtcagcagaagtctcttttataaatgcaaatccaaacctgtttatacttggccctaaatgctgcagtcctcattgccctgggccctaacgcacaccctccaggctcattctctgggtcagaaccttagtgagtccctgaacacaccatgcacattcacctggccttgctcttgaacttgctgctcttcgtccagagaacccttgccctccattctggtctaataagcccctattcattctgtaaaactcagtgccagtgccacgtttctccacgatgccccctgctcctggctgccgctttcacacttaacaatgagttatctacctttgcaaatatgcattgcttctgcctggctcttgcaagcttcttacaggcaggagatggtgtctttttcacctttgtatccctggttatttgcaccaactctagcaaagagcaggtgccagatcatgtcggaggagctgaactaggtgtttggaagtgctgcatgagggtctgtgcttacaacctggatcttcggtaaaattctcgaggtcagacaggttgaggctctaacagaggtggctgcttttgtctgtgagattcctggcgggtcagtatctatccatcatcaccctcctgtttttttttttttttttttttagacaaagtcttgctctgtcgcccaggctgtagtgcagtggcgcaatctcagctcactgcaactactgcctccagggttgaagcgatcctcccacctcagcctcccaagtagctgggactacaggcatgcaccaccacagccagctaatatttgtatttttagtaaagacggggtttttattggccaggctggtctccaactcctgacctcaggtgatccgcctgcctcagcctcccaaagtgctgggattacaggtataaaccactgtgcctggtggcctcccttctttactccctatatctgctggttcctgcactcagagctggaactgtgcagagggcaaatgtgtcaaagaaatcccacacactcctgcatcctcctaaggtgtcccacagacctgcctgggttcctgctgagccaaaaagtccatctggggtgcccacacgttgacccctctgcccatccagccagagctcaacagtgcacatgctaagtacttctgcacccagaagcacgaccaggtcacatttggaggctggaatggcagccctttgggacttgaccctatctccctgcctttgcagccatctcttctctcactcacccattctctggccttcccaagctactcacactcccgaatggaccatgcattcccaccgactgtacccccatcctgcaaggccttctgcacctggcaagctctgcccattccccaggagccctcacaagtgtccctccctctgtgacttctgtcctgactcgcctcccctctgctgacttaagggctttggagcactcaccaccgtatgctagtgatttgctgcttctccattgcacggggcccatgaggccctgaggacaggaatggtctctgtgtcctgggtttccctccaggctggggtggtgttctgcatgcagcctgcgctcaatttgtgctcgtgggcaccaaatcagatgctcagaatggtggaaagaacattctagaaaacagctactctggtccatccacacccttcccaggaaaagaagatattgatataaaatcttttcctttctctaaagaaatatttgcaaatcttttgccaaaatctctgtgagtgagcatgtacaattgctgcaaactgcaatgaatgagcaaaaaggttaattttcactcccctgtctgataacagggttattgaatcagactcctcagcagagaccctcagaccaccgggctgagcccctcagctttttttttttttttttaaatgggaaaaccacacgtttaaggaccatccttcttttcaccaatgagaaatcttgagcctcttcctagtcttgtttcactaaaacactttattttaatcaagtacttggagagaaagctgctgaaacttattcaaatgcaacacttaattttaatcaagtagttggggagaaagccaatgaaactatttccagagtatcctatacagataggaaagaaggtaacatgctgttcagaggcactgctgtttctgtgactgggtccgtagtctaatacagccaaaatattattatttaaaattaagatgttttttaaaaaagacacaaaacatctaaagcctccattccaaaaagtggggatctctattacaaaagaatacctcaatcaaagttacctgctatgccctgtctcttctcgagcagacaggcccctgggggaagctggggagaaggagattgttccagaggcctggcttccagaagcttccccctctctccatgcaagcaaacaacacaccactggaccaggctccagcagctaaaataaaacagctgtgtttctcactcaacaccctcttttaccagatgaagggcactgattcatggaaaggagacaaatatttcaggccattttttcagacactgacaaggagtaaattaggaaatcatgtaagtacaatgcgcgcgtcatcgcttcctattgatcacatgtaatttacatcttacaaagatgtgaattcttgcattctcactccacaaggaaaatctcgatgatttattcatttcaaatgaaaaatagaaggtagatgagaagaatgacttcacagactgcatcgttctcggggcactggtgcgaggctttctcatacactgcccgaagggctccgtgtgcaagtccctctaattaacaaggtgaatcacgctgcagctctctaattagtgagcctgacaagccagcggaaacagccaggcagactggtatacatcgctggccgacaaaggcacggcacattccaagtgaaaaatgcagatttctccgaaataactataaaaagtaagatggttggggaaaaaaaagacccacctaattttaattctcatgtttcatgtgcagttcttatttgctctcatgcgtaaccagctccttggtaagatgagatttgcctacgctctttgaaccacctttccagggaaactatcctttaaaacagatgcatttttaatgttattttattgtggtaagaacactcaacatgagatctaccctcttaacacattttttaagtggacaatacaggattttttactacagagctctagagcttattcatcttgcttaactaaaactttgcgctgctcatgcctgtaatcccagcattttgggaggctgaggcaggaggatcgcctgaggccaggagttcgagaccagcctcggtaagatagcaagaccacgtctctacaaaaaaattaaataaaataattagctgggtgtgattgcatgcacatgtagtcccagttacttgggaggctgaggcaggaggatctcttgagcccaggagttggaggctgcagggagctatgattgcgccactgcactccagcctgggagacagagtgagactctgtctcaaacaaacaactctgtgcctgttgattagtgactgcctgtttctccctcccctcaggcctggaaaacacccctgcacattttgattctatgaatctgacaattttagatacctcatgcaagtggaattatgaagtatttgtctttctgaaaacacaggtattttggcttgatataagaatcagtgtctcagttggaaattcatgatcttctgtatgtatttttgtccaacatgcagtaccttctagaattattcctacttctgccaaaaccagagatgtctgatgtcaaacctctttgtgatttacttggtgccattcagtcagtcccacagcacaccctacaaggagccctcaaaagccaggaaagggtagaaacttctactctccaaagaggggtggtacccatggttcctgagtcaccagcctggctcacaggtcccactggagacaggcctggtgcactggccatttgccctgattttaattgtctttgctcatctgccaaccggaggctctccttctgtattagtcagggttctctagcgggacaggactaatagtatatatatgtatactattatatatatatgtatatatatacacacacacacatatacatatatacatatatatatataggagcttattaggtagtattaactcacatgatcacaaggtctcacaataggccgtctgcaagctgaggagcaaggaagccattccaagtccccaaactcaagaacttgaagtctgatgttcaagggcaggaagcatccagcatgggagaaagatgtagcccaggaggctagtccagtctactcttttcacgttcttctgccagcttttatactagctgtgctggtagcttattagatggtgccctcccagattgagggtgggtctgcctttcccagcccactgactcaaacattaatctcctttggcaacatcctcacagacacacccaggatcaatagtttgcatccttcaatccaatcaagttgacactcagtattaaccacgacaccttccatgatcattagctaggctttctgagtgggcccagcagcttgggaggtgtcctgggggcagctgccaggtgacctctgatatggtttggctgtgtccccacccaaatctcatctcgaatcgtaatccccacatgtcgagggagggatccggtgggaggtgactggatcatggggacgatttcccccatgctgttcttgtaatagtgagtgagttctcatgagagagctgatagtttctaagtggcagcttcccctgcactctctctctcctgccaccatgtgaagaaggtccttgcttccccttcaccttccaccatgattgtaagtttcctgaggcctccccagccatgcagaactgtgaatcaattaaacttttttctttcacaaattacctggtctcgggtagtatctttttttttctttttttttttttttgagatggaggctcactctgtcacccaggctggagtgcagcagtgcaatctcttctcactacaacctccgattcccaggttcaagagattctcgtgcctcagcctcctgagtagctgggattgcaagcattagccaccacacctggctaatttttgtatttttagtagaggcagggattcaccatgttggccaggctgttcttgaactcctgacctcaagtgatctgcctgccttggcctcccaaagtgctgggattacagacgtgagccaccgcacctggccattggtagtatctttatagcagtgtgaaaacggactaatacaagctctctccctgcatcagccaagtttcgcaggcgtggcctgcagtcacccacagcacagggatgtgctaagagctcaccacagcccacaacagtggggaaaccaccgctcatgttcacctccggtcaattgctccagaggacatggccacagctgctcccttgcaggctggtgggcttgacctcactgagaactgggaatgacctctgcgtccttcacattccagcagcttccagtggagcttggaaggtattttcttttagcattggagaccagttctttaatggatggaaaaaaaaaaaaagtcttgtgaagggaagacttagattcagattcaatgcacttttattgaaccctccatgccagacaccatgctgggaattttctctggagtaggcattgatgttgctactgttttataggcagagacattaggtgtcgggagtgtttaaaattgtgcccagagcagttaggaaatgaagagaagagaagcagaatatgaactctggggtttagaacccagtctgcacccgcacctccctctttgttttaagactcgtgttccctggctctagacttacaaaccgtaggttgtcacttcacaaaattcactgctcttctcagccaagaccagtcacagcagcacactctaatgccagtgagcaaatcagcagttctttgcaatgaatggtcttcctgcctctctctggggagaaataggaatgacaggtttagaaatgtggggacccttttaaggacagccttatgcctgcagcatgactctccctgaaagactgaaactggcaaaacattatttcaaggcaaatatatgtgaaaaagatctgagaagcgtcaccaaaaggaggaccagtcaaaagaagaagccaaagggaagctatggctacgtgggaggccacatttgctcccactctgccaccacctggggctctgccctcctgctgcaagccatgcggctcccaggtttaaattttctatgagtttttctctgcatccaagcaagatcgccacacaccttctcttccctcgaactctccattcagaatcatacagtatctcattttcagcacaaacttaacatttaagagtttccaggccaggtgtggtggctcacacctgtaatcccagcactttgggaggccaaggcaggaggattgcttgaggccaggagtttaagatcagcctgggaaacatggcaaaaccccatctctacacaaaatacaaaaattaggcaggcgtggtggtgcacgcctgtagtctcagctacttgggaggctgaggtgggaggatggcttgagcctgggaggttgaggctgtagtgagccatgacagcaccagtgcctccagtctggatgacacgagtgagacctcatctcaaaaataaataaaataaaagtttccaagccagaggggtggctcacacacgtaatctcagcactttttgaggttgaggtgggaagattgcttaaggccaggagtttgagacaacctagtgagagcctgcctctacaaaaaattaaaaaattagctgggcatggtggcatgcacctgtagttccagctacttgggaggctgaagcaggaggattgcttgagaccagggggttgaggctgcagtgagccacgatcacaccactgcactccagctggggaaatggagcaagaccctgtctcaagaaaaaaaagtttccagcacacactggcccacaagagcagctgtcactgaggggagatcaagggcaagaatgtcacctgtgtttctctgtagccttcacacacttgctctaccagctctgcctgcagaagccttcctggccgacttccactgtccagtcttccatgaagctgtcccctggtcacccttattgccaactccctgccagagcaacttctccttcttctggatcctgtagattttcaatggctctttcttgagacatttaccacattggctttatactgttgtattagtctgttctcacacggctgataaagacatacctgagactgggtaaatcatgaagaaaaagaggtttaatgtactcacggttccacgtggctggagaggcctcataatcatggcagaaagcaaaaggcatgtcttacatggcagcagacaagagagaatgaggaccaagcgaaaagggtttccccttataaaaccatcagatctcgtgagacttattcactaccaggagaacagtatgggagaaactgcacccatgaatcaattattgcccacagggtccctcccacaacacatgagaattatgggaattacaattcaaggtgagatttgggtgaggacacagccaaaccatatcaaccatcatccgtgtaacagatcaaagatgtactttcagacagccagattgagctcagattctacctctgtcaatttctagccatgggaccttagtcacagccttgggtttctgttttcttatctgggaaaactagaaataaccctcctacctggaaaagctatgaaaaggattaaatgagaaaaagctatgaacaagcttcatgtgatgtctggcagagagaggtgggtgctaaggaataatttaacatttttttccttatttctttccttccttcctttctctttattttgagataaggcccctctccttgtcacccaggctggagtgtagtggctcaatcatagttcattgcagcctcggactcctgagctcaagcgaccttcccacctcagcctcccaagtagctgggactacaggcatgtgctaccacacccagctaattttttctattgttttttatgccatggggtctctctgtgttgtccaggctggtctcaaactcctgggctcaagcagtgccccctcctcagcctcccaaagtgctgggattacaggcttgagtcaccacatccagctaaatattaatttcatttttggaattgcatggcgatatggtttggctgttgtccacccaaatctcatcttgaattgtagctcccacaattcccacatgtcgtgagaggaacctggtgggaggtaattgaatcatggggctggatctttctctgctgttctcgtgatagtgaataagtctcacaagatctgatggttttataagtgggagtttccctgcacaaattctctcttgtctgccaccatgcaagatgtgccttttgccttctgccatgattgtgaggcctccccagccacgtggaactgtgactggggagttcacaatataaagttataattaactttataaattacccagtctcatgtatgtctttatcagcagtgtaaaaatggactcatacacatggtgtaacgaaaaggtgatatattgaaacttcaattatgtccgataccaaacccgcgtcagtcataaaccagctgttggcctagtacaggacactaagcccatctgagcctcagctttctcatccagaaatagggctaaccatacccaatccacagatgtgctttcctgaagtagcaggtgccagagcctttagcacaggggacatccaataaatgtcagtcagaagcaaggactctcggctgggtgcaatggctcatgcctgtcatcccagcactttgggaagccaaggcaggcggatcacatgaggtcaggagttggaggccagcctggccaacatggtgaaaccccgtctctactaaaaatacaaaagttagccgggcatggtggtgggcacctgcagtcccagctactcaggaggctgaagcagaagaatcatttgaacctgggaggcggaggctgcaataagcggagattgcaccactgcactccagcctgggtgacagagcaagaccctgtctcaaataaataaataagcacaagacaatactcattcagcctgcagaatatctgtccttgcaggtagaaattccccagggcctgaaagtcacctcaggccacgccaactctgcccaaggacagttcatattcttaggacagtgcttttctggtgctgttagggaccacgtcagttgcaatcaacctcttgaatgcagcattccctggtggaaagcctggcacggggtgtgtttgcttcctagggctcaaagacccacagactgggcaacttgaacaacagaaagtattgcctcatggtttggcggctaggtaggtagctgcaagtccaagaccaagttgtcggaagggtgggttccttctgagagctgtgagaagatctcgcatgcctgtctccttgctcctggtagcctcaggtgttccatggcttgtagatggctttcttcctggtctttaagtggtcttccctgtgtacctgactgtgtcttcatgtccaaacttcccctttgttttctttctttctcttttttttaaagacacggtctcgatctgtcacccaggctggagtacagtggtatgatcaaagctcactgtagcctcaagctcctaggctcaagtgatcctcccacctcagcctcccaagtagctgggactacaggtgcatgccaccttgcctggctacttttatttttatttttttgtagagacaggatgttgctatgttgcccaggctgtcctagaactcctgtgctcaagcaatcttccttcctcagcctccccaaatgctggggttataagcatcagccccagcatctggccaaaatttcccctttctataaggaaagcaatcaaattgacttaggacccaccctaatgagctcatcttaacttgatcatctgcaaagaccctatttccaaacaaggtcaccttcacaggtattaggggttaggacttcaatatcttttggaagacacagttcaacccataatacaaggaaaactctgcccatagtcatttgtttagaagcaaactctccaaggctctggctgggcagggagctgccctgctcagggtgaccgaagtgtgtgactggcatgctgtcaccacccacccaccctccttctctctgattttcccacacacataataaaaaatagtcttagtccatgatcaataacacacatctctatttaaataaattatctcgggataagaaagtattaattgcattgattgtgctccaaaatcagcattcaaaatggggagtggagaccatggaaataaataactgcaaatttcttactaaataggaaatgatcccccgaatctaacctctgtttactccatgtcttaataagagggaacattttgatctttaccgtcttgctgaatacaattagcacctgattcccactttggagttaagactaatttcccatttctacctctgacacctccctcagcctagttgacttgtctgacacattcaccagatactagaaggactgccaaagaggaatttgctacccttatcttttggggacagtaataggtttttcatgaggcttgacatgggtttagaatctttggcaaaaaaaagagaggtgaaaagtcctcaaaacagaattatcgctagttttaattaaatatctttttttttttttttcagacagggtcttgctctgtcacccagtctggagtgcagtggcacaatctcaccttactgcagcctctgcctcccgggttcaagggattctcatgcctcagcctcctgagtagctgggattacagacgtgcatgaccacgcccagctaatttttgtatttttagtagagacagggttttcccatgttggccaggcttgtctcgaactcctgacctcaagtgatccactcgcctcagcctcccaaagtggtgggattacaggtataagccaccacacccagccaaaaaggaatatcttaagatcccccagatattggtacatttgaaggtttaaaaaagtgtgtctgtgatgtttgtgtggaacagcagaaactgcacagaagataaagatcctttcatcctgccccacataaagaatgccatgaccaagacaaaagattcagagctaagcattagcctcagcaatgagaattgagaatccagggggattccacttgcaaaggggccaacgaaggactctgaaatcaaccaaaaggcctgggcagaggttaagagaacggggcttgcgagtcacgcagccctgggtgtgaactccagcgtctgccttccccagttagtgctccctaattactttcaacttcagttttctcatctgcaaaatgggattgatgatagtgctagtggaggaattaaatgaggtgatacatctggagtgctcagtgtggtgcctggcccagagtaaacgttcaaaagtctttggccaccatcaattgcatcatgaaatacgttaatatgttctgtttgtctgtaacggtcgaagtcaactgcagttggcaaatcccaggacactggcctgggtcttgttctctggctgtggggcccaagactcaggccagcggggccttgtctctatgtgaatgttttaatttttttttttttttgagatgaggtctcactctgtcgcccagactggagtgcagtggcatgatcttggctcactgtgacctctacctcctgagttcaagcgatcctcccacctcagcctcccaagtagctgggattacaggtacccaccaccatacctggctaatttttacatttgtatagagacagtgtttcaccatgctgcccagggtggtcttgaactcctgagctcaagggatccacacgcctcggcctcccaaagtgctgggattacaggtgtaagccaacatgcctggccaatttttaaaattaatttattttatatatgcgtgcacccaggagtgcaatggcacaatcatggctcactgcagcctccaactcctgggctcaagcgatcctcctgcctcagcctcccaaagtgttgggattatagacatgagccaccagccactgtgtgaacttttaaatcttctctgtctttcctgcttctctgactttctcatatccctccattctgttatgtaaatgctacattcctacccacatctccattgcatgtgtaatagtcaagtcaaaatgaacaggtctgaggccaagcccctgaaaattctctctctaacctttccctgctcacagcttctccatttcagttaaaggcagctctcttcttctggatgctcagttggaaaagcttggagccactcttaactcttctttacctaacactccacgtccatcaacaaacactgtccacttggccttcaaaatatatccagaatcctggccgggcatggtggctcacgcctgtaatcccagcactttgggaggcccaggtgggtggatcgcttgaggtcaggagttcgagaccagcctgcccaacatggtgaaacccccatctgtactaaaaatacaaaaattagccgggtatggtgacactcacctagagtcccagctactcaggaggctgaggcaggagaataattgctagaatgtgggaggcggaggttgcagtgagctgagatcgcaccatttgcactccagcctgggtgacagagtgaggctccatctcaaaacaaagcaaaccaaaacaaaaatctggaattcgaccacttctccctccactgcactacttccacctggtgcaggctgccagcttctgcccccaggtaaatgcagtggcccctgatcagcctctcagcttctaccctgacctctatgatctgttccccacgcagcagcctaaacgggctggtgatcaagtgggtcaggtcttgaccgccctatggctcagaccctccagtgattccccatcctactcagagtaaaatctgtccacgtccaagtcttagatgtgttttttatgttgttattgttttcagttctctgctgtgttttgtgagaggtggcttggacggaatggcagtggtaaggatggagaggggatgaaacaggaaaaggggaaaaaagcatgcagtcacatctaacacaaattttcattctaatagtttttccaccacttcttagcttagaaagtcttcccttctctagagatctgatgcatagccagttaaaattttcatgtgcttctttcttatagagtgaacttttttttttttttttgcctgatgttatcatccctaagctgcaaagatcttaggaacttttgcttctgttgaaccaaatggctttggagaggacaggagagcaagaatgagtgcaggtcatttccccccctcctttttttccttttttttttaagataggatctcactctgtcacccaggctggagtgtagtggcacaatctcaattcactgcaacctccacctctcaggttcaagcgattctcctgcctcagccttctgagtagctgggactacaggcgtgtgccaccacgcccggctaatttttgtatttttagtagagacaggctttcactgtgttggccaggctggtctcgaacgcctgtcctcaaatgatccacctgcctcagcctcccaaagtgctgggattacaggtgtgagccaccacatccggcctcatttcccctttctgatgccaattcactttcatgtgctcaaataaaccttaatacactatcaactggctttttctttacatttatacagaatcaaaaaactacaattagtgaatgtttattaatcaatagaattatcttcctttagccagagtcaagattaacactctataactatcaatgacttttagaaagataatcaacaatattcaaatttatcagttcattttgaacatcaccagtatctgatcactagaaagactgatcatattttaactactttataagtctcacagaaaaatcctaatttagtgtagtagaccctctcaaatatgtaagaaaaaattcccttccaactctcataagttacaaactcactcactgtaagagagacagctttaggagaaaattgaacatggtgtttacattaagaatggaaataatggcactcatttctgtttaagaaatgtaactaggccaggtgtggtggctcatgcctgtaatcccaacattttggaaggctgaggcaggcgaatcacttgaggtcaggagttcaagaccaccctggccaacatggcaaaatcccgtctctactaaaaatacaaaaattagccaggcatggtggtgtgtacctgtaatccacctacttgggaggctgaggcataagaatcgcttgaaccctggaggcagaggctgcagtgagccaagactacactactgcactccagcctgggcaaagaaggaaggaaggaaggaaagaaggaaggaaggaaggaaggaagaaaagaaggaaggaaggaagacaggaaggagagggggagagagagagagagagagagatcactggaggggtaatgtggtttggctctgtgtccctgcctaaatctcatatcgaattgtaatctccagtgttggaggagggtcctggtgggaggtgattggatcatgagggtagactttccccttgctgatctcatgatagtgagtgagttctcaggagatctgcttgtttaaatgtgtgtagcgctttcccactccactttctctctcctgctcagctgtgaagacgtgcctgcttcccctttgccttctgccatgattgtaagtttcctgaggcctcccaagccatgcttcctgtgcagcctgtggaaatgagtcaatgaaacctcttttattcatcaattacccagtctcaggtagttccttatagcaatgcgagaacagactaacacaagagggggaacacatttttaaacaacagcatgctaagcaacatctcattattcaattgcgatgacatccttgtaaatcagaaagctctttaataagctgaaagataaggtatttcccatgcaaataggaagttaaaaatagatcttcaaacaaggcttctttagtcaccgggacaccaattaatgacacactgcttaatttacacaaaagccaagtttagggaggatggctatatcttccttagcattaggttttttgatactttggaaaaatgggaatttttacatctctttgtatgactggctatggggatggcaaatggtgccctagatgtgagcttgctctgccctctccctgagaggaagggagtaactgagtcagactcaagcccacagggaggcctaagcaggggttctcggtcaggcatgggtttatccagacgggactcatccaaccaagctcaggggtcaaggctaaatcccaaagtcttctcaaggtaaatacaatctttttgacaagtttttgtctttcagtgggcaccaccaaagtaaagacagaagtttaaaacgtcttgtacaacgtggagttttttcctctatcctagatttttctgtcttaaatattgatttatttatttttttgagacctggtctcactgtcacccaagcttcagtgcagtggtgcaatcacagctcactgcagcctcaacttcccgggctccagcaatccttctaagtagctgggaccacaggcctataccaccatacctggctaatttgtgtatttttagtagagacggggtttcactgtgttggtcaggctggtctcgaactcttggcctcaagtgacctgcttgccttagcctcccaaagtgctgggattacaggtttgagccgctgcatccagcagcctctcttaaatattaatattctgttttcaaggaacatgaactttggcagcacaggttcaggacccctcatcagatgcccttgcagctttgccttgtctgttccagacctgccacgcaagctgtcctccctcagtatctgccaaatgcaagtcgcccctcagctagcgctctcagcttggtccttgatggcacaccagcccaggacaactgataacagccagacctgcatccctttggtgggccagcatcactcagaccccacttgggagagttcaggtgaccccctcttgcccacctattcttggccttctccacaacccagtgaaaccagcctgtaatctcacacctgtgaagggcttggcatccttttcaagcctagtgtcgtgtgctctgtgacctccagattatggataaagatgtccaacaagggtgactctactgtagttccaaagaatctaacatgagtaaggttccaggtcattcatctctatcctgaagcttctttcagccatctttgcacacatgccaagacatcatcccccacccacaatggagctagtttttaaaaagcatcctccatatgaagtgttgtcagtgtccccactgttagccctgcagatgcttatgacacttagggacatcactgggtctgatttcttcttttcctccactgctcaatccctcttctttttttttttttcaatgctttttatgcattgggaactattatatagtttattttattattttattttattttattttgagacaaggtcttgctctgacacctaggctggagtgcagtggcacaatctcagctcactgcagcctcaatctcccaggcttaagcaatccttccacctcagcctcctgagttactgggaccacaggcatgcaccacggtgcccaggtaatttttttgtatttgcagagatggagtctcattatgttgcccaggctggtctcaagctcctgagcttaaatgatctgcccgccttggcctcccaaagtgctggaattataggagtgtgccactgcacccagcttcttatatgctttgtttaattaattttttaacttaacaaaaatattaacattattccatatttgttttaggtttatcttttgcttttgttgtgtaagaaataaaacattaccaccagaggtgaagaccccatttctttcctctgtcccaccacttaccccctagaggtaactggaagttggtgtgtgtcctttccattaagatgttgttatatctttaaagcctctgtatgcatcttaaaataagtaatagtattgttttccttagttttaaactttggaccaggcacagtgactcacacctgtaatcccagcactttgggagaccaaggcagacagatgacttgagcttaggagttcgagaccagcctggccaacatggtgaaaccctgtctctacaaaaatacaaaaaattagctgggcatggtagcacgtgcctgtggtcccagctacttgggaggctgaggtgggaggatcacctgacctcaggagggaggttgcagtgagccaaaattgtgcccctgcactccagcctgagtaacagagcaaaaccctgtctcaaaaaaaaaacaacctctacaactttgcattatgtcatactgtacgtgtcaccactcaacatgttctttctccattaatatggcctcaagatttatccatgttgatgcacatagatctagttcaataatttttgctgctttatgttaattcattatataaatatatctcaattgtcttaatccattttcctattgatggacacacaggttgtttctcattttttatcatcactatagtgctgtaataaagactctttagaagtctcctttgtacacattcaagagtatcccaaggatataaaagtaagtttgggatgattggatcaaaaagaatgcatatagtcaactttcagtagatattgccatctgaaacacgattggctgttctgacttacactgtggcttacatggtgacttcctgtttctccaatctgtttcaaacacttgtcagatttttttttttaattttggcaatataatgggcatgaaacatatcactgttttaattttgagttccctaacttctagagagttgggcatcttttcatatgcttattggttactaaaacatcctcttcatatcattgtctgtatctttagtcatttttattgagttgtttgtgtattatgtttgttcatttctcttttttctttttttttgtttatctggatgcaaatatttggtcaattatggatatttttgaaaaatcttttcccaaataggcttacattttaattttaattttaattttgatgactattgttgttaagaagttttatattctattctggcctaatttatcaattatttcctctaaatatgctgtctgactacttctatcttaagaatgtcaagataggatattctattttcttacaaaattttcttattttagcctttaatttatgtggaatatattattgtatatgaagcaggtagcaattcaattttcttttttcaagacaagtcaattttggaaaaacaagaataaaacaagcacttctactttgagtaatgcagaaccagtttccacaattagataatctgaaaaaaagtaaaatctgcttggaaacaccagagaggtccaccatgatagtgaagaattaccaggctaggatctgggaaagaatggagaccccaggtgtagagaatagcatttggggccactttccccaagaaggtatctgccaattctgaggtgggaagtctgagaagccaaaaggttaagctacaatgttgacatccttgagggtgaaagggattggtattcaggccttccaaatagggagatgactagtgagtccccaacaatttgcatagagccacaagtctgtatcctgggagtaaggaaccacagggaggctcttgcaggaactgcaactcagttacaaatcatctcaagctccaacattggattaaagtagtcccagatggctaatgtcctcagctgcttggcagaagcaaaaaataaatctattctccaggaggctaacatgatcccaggcctcaaaactttctatgaacaatattgtacatacaatgtccaaggcacaataaaaaccaaccagtccaccagaaaatatgaattaaaatcaacagaaataacagtcaatagacacatacacacaggggcaccagacattgaagctataagacacatactttaaaacaactatacttgctgtgctcaaggagatgaaagataagattggggaatttcagcactgatctggaaactaaaaacataaagaaataaaacccaactaggtggaaattcaagaagtgaaaaaaatcaatcacccaaattaagatctcagggcatttttttttccagcaggctatacacagatgaaaagataattattaatacactggaagataaagcagaagaaaatattcaaaagtaagatgaagtgataacaggctggaaaattttgaaaagaggattagagatatggaaaatatagaaagaaggtctaacataccagtgattgaagtcccagaagaaaagagagaaaatgatgacagtgactgagaatttatcaaattgttgaaaaacatccacccatcaactctgtgtcacttcaacccgggaggtggaggttgccgtgaaccaagattgcaccactgcactccagcctgggtaacagagcaagattccatctcaaaaaaaaaaaggatacatttaaagcaaattttaacagacatcaaacaacagaaatcaaagatgttttctgattacagtgtaatcaggctattaataagaagaactaataaattcctatatgtttgaaaattaaaaacccatgagttgtagaagaaattacattgtaaattataaaatcttttaattaatgaaaatattacacaccaatgtagtgggatgcacaggaaaccatgtttagaaggaaatttttgtttaaatgcatgtattaaagaaataatatctaaaagtcaatgaactaagcattcacttcaagaagacagaaaaaattaaactaaaaaaagtcaaaggaaataaacaataagaaaaagggtagaaaatacagaaccaacatgcaataaagaaaatcaacaaaggtaaaagttgttatttgaaaagattaacaaaatggaaaatccctaacaagacaataaagagggaaagtgaatgaaaacggcatgtcactatagatcttacattttaaagaggttattaatacaatatgaacaattaaatttctttaattatggaaattcttctagttatccttttaaaaaattgaattctagcttaatcacactgtgtctctaaatgaagtgaatcctttgaaatttatggtcaagtttcaacatattccaagtatgcttgaaaagaatggttattctgtagatgctaggtgcaaggttttatataggccaattaggtcaagtgtatcaatcctatttcatgttgttgttgatatttttgtttactgttctattagatactaagaaagataccataaaatctccccctatgaattaggatttatatatttgtacttgtagttttgtcaatttttgctttatagattttaagtctatattattaggtacatatatattagaattgtcgtgtcttgatgaattaaaacttttgtcactgggaagtggtgctctttggctctgtttccttaaagtctactttatctgatgttaatatacggctgtgcttgctttcttttagtgttgtatggcattttttaaaatccagtgtttgtatggcatttttaatccatcttttggattaatgtaaaaaatataaaaacattttttcataattttttgttaatacataaagcttgtacatatttctcaggcacatgtgatattttgatacatgcatacagtgtgtagtgatcaaatcagggtgattgagctattcatcacttcaaacatttatcatttctttatattgggaacattccaaatctttcttatagctattttgaaacacacaataagctcttgagtatagtcacagtagggtgactatacttaataaccaatagctaatgagcactaaaacttactccttctaactggatttttgtactcattaaccaacccctctacatctcctccttgctacccctccagcctctggtaatcaccattctactctctacctccatgagctcaacttttttagctcccacatatatgagtaagaacatgcaatattcatcattctgtgcctggtttatttcacttaacataatgtcctctggagtcatccatgttgctgcaaatgacaagattttattctcttttgtgactgaataatattccattgtgtatatataccacattttctttatcaatgcattcattgatgggcacttaggttgattccatatcttgactattatgaatagtgctgcaataaacatgtgagtgtcaatatctctttgatatatcgatttcctttcttttggatatatactcagcagtggtattgctggatcatattgccggtagttctgtttttagttttttgaggaacctccatactgttttccatagtggctgtagtaatttacactcccaccagcagtgtatgagggttcacctttttccacatcctcacaagcatctgttttttgttttattttgttttgtttttgttgttgttgttgtctttttgataagagccattttagcttggataagataatatcttattgtggttttaatttacatttccctgtcattctatttttatgttcctttatattttaaacatgtatttaaacatgtatttgtatttaccatatagatagattttaaaatccattctcacagcatttggattttagttggaacacacttcattaacatttagtgtatttattgatacatttgggcttaaatctaaaatggaatatttggctcacgtgttctatattctttcctttcttgccttcatttgaattgacacacacacatacacacacacacttttttctttcttttattagcttaaaaattgtacagtcttaaaactcttttaacgattaccctagagatcaagataatcatccttaatttatcaaggtctatattaatttatattaaattagcacttttacttctttccatataattcaagaaccttggaaaactttaactgtctttatccttctctagacttatatgttattcttgacatgtatgttatttctctttatattttaaaccttaggagacattattatacttgcttaatacaggtaaagtttatttatatttactcttatattaatcgctttttgttgttcttcactacttcctgaatgaccaagcttccatctagggcaattttttcctttagcatgtcctttagtgaaaatctgccagtatttaattctctccattttttgtttatgtaaaaacatcttcaattaatctttattcttgaaggatattctaactgtgtacaaaattccaggttgacagtttttttttctccccagtatttcgaggatatcattctagcccagttcaattttttttcattccatggttgacaagtcaaccattagtctaagtgtcacttctttgaaggtaatctttattttttctacagctgcttttaagattttctctgtctttagtttttaacagattagatagatagatagatagatagatagatagatagatagatagataaattagagggtgtagttttagtcatatttacccttcttgaagtttcagacttcatgaatctgtggcttgatgtctttttgaccaattcttagctattatcttttcatatattatttctatcatattatttctctcctttccttggaatctaattacatatatgttgagctttcttactatatccacattatctcttaccctttcttctgtctttcctattctcttatttttataattcattttggatattttctcctggcttaacttctagcatcttgctattcagatggtctatgacaatattggcatatctgggagcttgtttgaaaggcagcatcctagccccaccaaagcctactgaatctttgataaaggaatattaaagtctcctactgtaattgcagattttgtctatttcttcttgcagttctatcagtttatgcttcatgtattttgaagctttgttattgggtgcataaacacttagaatagttatttcttctatcatatttatcactgataaatgaaaatgataatgataatccctgtttttctaaaatctatttaacctgatattaatataacaaccctaactttcttttgactaaagttagcatagtatatctttttccattcttttactgttaacccatttgtgtctttatatttatagtgtgtttttagtaaacagcatatagtcaggtcttgcttttttagccaatctaggaatctctgccttttaattgaggtatatagaccatttacatttaatgtcataattgatatggttagatttaagtctattatcctgctacttgtttttcacttgttccttctgttctttgttcctctttttctaacttcttttacattaattgaatttttattcctttttttggcttattagacacgacttttattattttcatggttgtttttgagtttataatacatctttaacatattacaatctacatttaaataatattgtaccacttcacatatagtataagagtcctacaatagtatattcccatttctcccatcaaggcctttatgatgttgttgtcatacattttacataagtttacactactctgtaatatttgcttctcttattctgctatgtatttttctgctggctctttctcttgatgctttgactgtgtatgtatttttttgtatgtttttatttattcctttttacccatgtgctcatttttttagaactttatccaggcaaattcttgagattgtagtgaaggtggattcctctagaaagagaatttgtgtttgtttctgtctattgcactggagtactaccagtatggcaatactttatactaaaacttcagattaagatttttttggaccatctagacagtgtgagttttgggtgcaaactagcatgagaatctgtttgttatggcaaattttcaagggagactgaaccctgccccaatcctatactagcaccattcatattttttcataaaattccctgaggatagcaggactggtttatttctagtttgtccttgctttaaggatataatcttgaagtctcagctttatgatggatgtcttccattagacgctctgttttggataggccccaagctttgtgtcctgcattccacagcccaaaaggaaataaaacccaacttcaagttcatcttatctagtaaatgttctcaaggtaaagaagcagcatctatgctcttttctgaattccaatcttcagttgatttttggtttgagtgcttcttactttcttgccagatcattgattcatttaataatttgttaaaaaatttttttcttcatctggcatttctagttgttttccactggggatgttggccagggtccctcatccactgaactgccaataatggaagtctttcatagcaatgtttctgagacgccaaccagatcacttaattttactccttacacatctttagcagctcccaactgctcttgcaatcacacggaaactccttagcttgacatccgaaactttctgatctggcctctgcttgcttctctagcctctctgaaaggtcattatgagatacattgtaccctgcactgcattctcacacctcgttgcctttgtgtgcatactcttttctctactccaactttatggctcagcttaggtaccattcctcaaggaatctacccacaactcagtctgggtttatgtagtcatggtctgttcacagacattaccatgcttacccttactgcactgtaaaccaactaagtgctagatcagtccctacagaaaccacataggctagtccataataggtgttgctctattttgaaggtttgtcccctaaacctcatgtggaaatttgatccccagtgttgaaggtggggtaatggaaggtgtttgggtcatgggggcagattcttcacaaatgacttggtgccatctgcgtggcagtgactgagttctcactgtattagctcccatgggagctggctgtttaaaagagcctaggacctccctccccctctcctgtttgtcccctctctcttgcttctctcaccgtgtggtctctgcacacactgtctccccttcctcttccactacaagtgcaagcagcctgaggcctcaccaggagcagatgctggaaccgtgcttcttctacagcctgcagaactgtgaaccaaagaaacctattttctatctcaattacccagtctctggttttccttttagcaacacaaacagactaagacagatatttaacaaatatttcttgaatgaatgaagaaatgaatgaatgaatgagcaaaccgttattgccatggtgcacatgttactgagagttagagtggacaaagaagagtttataaaggataggggatttgagccagaaaattttataatatttaaacttaaagaagcttcaggtaaccttaactgaatactaatttttaaagaagttcgaagtcttaaaatttctcaccagtcatatgttttgaacctcttctgcaggaaaaccttagtcagttaaattgaagaaggattgtcttcacaggctggcatcttcctaccaaaattctgagcagcacaggatgcccgtttctgacttgcttaagaaaacaacacagtcaggtcaggtcttaccaagcacagcaaaaatgaagcaagaattgttgttggtgaatagggtggaattgggacaagtaggaggaggttttaccctttttcataaataaggtggttgattttgtactggagctgacctgaatataatgcagttggtagtgttgatctttacttacattggctgcagagaactgtccttgctctttctttccccttccaagactgtctaccagctggacttttaccatccaaaacagtccaatctgaaatacaaacccaggacacgtgaaaacaccaactgggacaagaaatcatatgcaaagacattaattttcacttttattgttccagctgttttactgttaattgatacaacctatttattcataaataaatgtattcacagcaaaaatgtggataatcaaacctgatataaccatctgcctaaagatttaaatttcttcaaccttagaaaattcttaaatgcaatgattattcagtggctggaaaggactcttcttaacttatagtactttctgcagtttggtgaagataagatttcttaatttggtaatttggggtagattagagtgttttcataatgtcaagctgaagggtcaaaaataattaaggatacaaagtattattcaattattatgctaatacatgtatctggtgaccactatgaagcaaaaaaaaaaaaaaattccatacatttgatggcatttgcaattttgtatattaaagcttatggttactatattgctacttactaaaaaccaatagcaaataaagcaatatcaatattcaagaaatgagcatgataaaatgatgtgattaaagccaaatggaggccaggcacagtggcttacgcctgtaatcccagcactttgggaggccaaggtgggcggatcacctgaggtcaggagtttgagaccagcctggctagcatggagaaaccctgtctctactgaaaatacaaaaattagctgggcctggtggtgcacatctgtaatcccagctacttggaagactgaggcaggggaattgcttgaacccggaaggcagagattgcagtgagccaacatcgtgccactgtactccagcctgggtgacagagcgagattccgtctcaaaaaaaagaaattcacaagtgagtagaaactcacaaatgagtagaaacttacaaatgtataaaataaatgttagttaaatgctccagttctgtttggttgcataacaaattaccccaaaatttaggagattaaaacagcaaacatttgttatctcctacaggttctgaggttcaagaccctagaagcagcttagctgggcagttccagctcagagtttctcatgaggttgcactcaagctgttgcctggggctgcagtcatcctgaggcttgactggggctggagaatccaattccgagctcactcacatgctgttgttatacctcagtttctcactggctgttggctagaggcttcttctcagcataatactctgcttaggactgcccacaacatggcaactggcttcctttggcctgagccaagagagagcccccaaggtgaaacccacagtgtcttctatgaactaatgttggaggtgatacaacatcactccaccatatgtcattggtcacatggactaatgccagtacagtatgagagaggactacacagggtgtgaatactgggagtaggggtcattaggaaccatcttggaggctatcacatcaaatgaataaacacatcctttaggaaacttgtgtagcctatttatctggtttccctgaggaatttacccccaagatactcctggccccttacccccttctcccaccctttactactcaaggggtacctggatagtgggtcatagcactggtccacatttcttgcctggatggaggtcatctattaaaatttatgagtaaaactaccttcttctctctgagctagttcacgacagaaatcttggttaagtgaatccactttgcagaccaaacttgccttcagatggagagttccaaggtctaaactggctacagagagtcagagaagccactggccaggatgtctggccactcttttcaatatattgttgtgatggagatgatggagatgatatttaatctccattcatctgattctcatttcttcccttggttggttctgaactcagctagggaacaaaggcattctttatcagcaactcagaccccaactagaaggaatgccttgacagaatgagaaaacatcatccaatggcactggggcattttatataatttcagctgactagatccaatcatcagcttaggaatttcattcattgattgtcctcactgacatggaagaaatttttaatatattaattaggctattttttttttcctggaggttcaaactcttaaaattgtcctttatttttgtagtggtgctttctccctatgggatgcaaaattggaaatgaagccatggcattgtaatgcatgcagagttttagttattggcactccaattgccacggaataatcaagagatgcaaaaggattgttactttctaatgttcagtcacttctgcttctgtttttgcataacactggactccagctgaacctacctttgtgatctgattcatgggttcctgtaagatattaatgtaattcctcaattttaagatacatttcctcccacctcttaatgtttctgggatcaagatgtcaaaagaaacttgccagtgctttctttcgctattaaaggtaggatgcattctaaaactagtgatgttttggaatcaaagaaatgtaaatgtaaggcacctgggctgatggcaatcttgcagcttgaactgcctaagtgagagttgttcaacaataacatttggtatgttttatctgacggtttttgatatgtaacgtggctgtgtctcctggcaatcttgattggtttttatttctaggagggttgacggtttcttgggagatttggagaatactaaatcaagaacttgtctagctggataggccattctcacagacatgggtgggaaattcactggaggacacctgatacccttggttcctaggctgtccttaattcctgcaggggctatctaaagagtgagcctttcatgttgtgtctctgagccctcaaacttgaccttactgtacttcctgctaagtgacatggaaccaggacccccagagaactgttagagggaagaagttgcttaggatatctaaagcctagaaacacagcctggaggagggcctttggttggaagagtggaatatgctgtaatatgtctaagaaagcagcagtgagtgatactacctgtgaaagaggatggaagatgacaagttgcagcccttaggaattaagaatagtatgtatgtcagaggcatttgaaccagagcaactccatcttgaataggagctgggtaaaatgaggctgagacctactggactgcattcccagacgattaggcattctaaggcacaggatgaggtggaaggtcggcacaagatacaggtcataaagaccttgctgataaaacagtttgcagtaaagaagctggccaaaaccccaagatggctgcaagagtgacctctggtcatcttcactgctacactcccactagcaccacgacagtttacaaatgccatggcaacatcaggaagttaccctatatggtctaaaacggggaggcacgaataattcactccttatttagcatatcttcaagaaataatggtaaaaatgggcaacagcagccctcaaggctgctgtatctatggagtagccattcttttattcctttactttcttaataaacttgctttcactttattctatgggctcgccctgaattcttttttgtgcgagatccaagaaccctctcttggggtctggattgggacccctttcttgtaacacatatatgtttgtgtataaaatagggaatgaggtcagcaagcagctgacattcccaactacaccaagcatcactacaccaatgcaagaaaaagaaagagtcagaaaagaaaaaaggtgggggagaagattggattcaccctggaagagcagtattcatggcttaatgttgctggctaggaaatatgctcccctcactggaaagtatttatattcaaaagaatttctgcattggatttatctagaagcccaggcagaggtgaaggtgaatataaattagagacaaagagtctgctataagccataacatgacccaaggcagagcaaaggattcactagcaataagacagcaccacccagctcaggaaagggcacagctccaggccaaatagtctcatggcaatttacagaagctttaatttggatgtgcaatgtaagggcagttattctgagcaattctattgttgcgtgtgtaaaatgatcccttatgtggcctgtgtagatttatgttattcctgcataatcagatagcataaagaaaatgcccattccatcttttggggtgttacccacacccaatataaaggtgattccctaccagccatgtttgtaccacatgaccaggctctctggccatagctggctagatcaggagcagacaagtgtctggctgagccagtctgacactgagaatgaggatctgtgatatagaagaaaacaactaatgtgcttttttttttcttattctcatactcaacaatcaacacaggatatttttgtggctgggtacaggggtgtacttccccacacaccaagcagccaattttgcagtttctccaggagacatcagctggttgtcctctaattcaattcaattccatcccgactctatctacctagagatagcatcagatcctacagggtgaggactcagtcccacatgacagtcacagccaggcagatactagtcgcaagcacaggctgtgacctgttcttctcaccaacgagctgtaagtcagagctcccacaactctcttatggggtttgattaatgtgctagagtggcccaacaaactcagagaaacaccttccttactttaaccagttgattaataaaggacacaggtgaacagccagatggataatgcctttccataaggcaaggtatggaaggacagacatggggcttctatgtcctctccagatgtaccaccctccaggagcctccaggtgttccaccatctgcaagcccatctgaaccctgtccttttagggttgtatggaggctttattacataggcatgattgatcacattgttggccattggtgattaactcaacaaccttcaccccctctcccatccccagaggcagggggaggggctgaaagtcacaactttctaatcgtgccttggcctacccagcgaccagccgccatcctgaagttgcctagtggcccccggccacctatcttcacattagcatacagaagatactcttatcatgctggagattccatgagtcttaggaaccctctgtcaggaaacgggaagaagaccaatatatatagattgtataattcccagtatcccacagaggaaccacttctacctggattgtctccttaaatgacaagacatgagaccaggtgtggtggctcatgcctgtaatcccagcactttgggaggccgaggtgggaggatcacttgaggccaggactttgagaccagcctggacatcatagcagaccccatcgctacaaaaaaatttttttttaattagcagggcatggtggcgcacacctgtggtcccagctactctggaggctgagatgggaagattacttaagcccaggaggtgaaggctgcaccgagccatgatcgcaccactgcactccagcctgggtgacagatcgagaccctgtctcaaaaaaacaacaaaaaaggcaagacataaacctggaacttggggtgtgtctatcacagcctctgcggcaggaagagaggaatgagcacactccccaggggaagtagaggctagggacctagagagagggaaagaacataggtatgaagggtcctggtggatcctggctccagtcctttctgaagctgcatggccatctctggactctcttagatgacctcacaactgtacaatggatgtagttcccccatttacttatgctagctttaactagtctatgttacttgccaccaagagactaagattcttaactaagacaggccacaggacttactataacttaatatacctcacattctccttgcctaacttcgatccacatgttccttcctcccttccccttagacctctcctagtccagagtgggtcagcaggatgaaagaacgggagaggcagtgttaatatagaaatggatcttgtaggccaggcggtggctcatgcctgtaatcccagcactttaggaggctgaggcacgcggctcacctgaggccaggagttcaagaccagcctggccaacatgatgaaaccctgtctttactaaaaatacaaaaattagccagatgtggtggtgtgcacctgtaatcccagctatttgggaggctgaggcatgagaattgcttgaacttaggaggcagaggttgcagtaagccaagatcacgccattgcactacagcctgggtgacagagtgagaccttgtctcaaaaaaaaaaaaaatggatcttgtagtaaaaaagaaagataactttcaatataagagaaaactattatgaccttaattcctgctagctatatttcagcttcagagcagtgacttatacatggtggtactactcaatatttattcaactgaatttaatgtgactgaatttaatgtctcaaactaatgtccaaagctgagcatcatatttcataggatagcattagaggcattctcagtgaataaggaaagagaaaagaatagtcattattcctgttatttaatgttgtcccagaaataccatttagtatactaagcaaggaaaagatttgaaataaaatgctttgtaaagtttcagaaggatggagtagatgtacttttccttacttcttcagctaagtacaacttaaaacccttgacattatatataaaatgaacagaagaaaaccccgaaaggtggagagagaaaaaatagactctctagggacctcaggacccaaggaacaatatagtaatgtgttctttggattttgttttaccttaaatatcctagacatgtagctaaagaactcacaatccagaaacaccaaaatgcacagacaaaaaacaaaaatgttccaacaagacatctgctttttctagccaaaggaccaggaaagagacaggctagcaagacagaaaacttttagacaaaagccgctttactccagccacataccacagaaaaagcctcaccctgccagaccagcaaagggtgaagaagagcctagacctccaccaccaccaggctgtaatggggtgccccaaaccacctgccagggcgatgtcaaagaagaacgagtagggagctgatattttcatccccatctggcagtaatgaggcacttcttactctccccactggagtggtatcagacaagacctaaagaagagtcaagactttcacgactgcccagcagtaatgaggccacctcaacctttcccccatggtgtcagaagaggtcacatggagagcagtaatgagacacctttatcccttcccagctcatgggaaacttgaactctcatccccaaccaacagtaatgaggagtctctctatccttggatgtcaacagaggtcacatagaaacctgcactttgaccaacttttggtagtaatgaggcagcatcccctttctcctgctggagtgttgtcaaaagggactgtctaaaatagaaggtttaaataagacccagattctcataacatagtacccaaaatgtgcaggtctcaatcaaaaatcactcttatcaagaaccaggaaaatctcaacttaatggtaaaaagacaatacgtagatgccagcactgagaggacggatgttaaaattatttgacaaaccttttaaagcagccatcataaaatgtttcaacaggcaattatgaacaagtttgaaataaatgagaaaatagaaaatctcaacaaataaatagaagatataaagaagcagcaaatggaaattttagaactgaaaaatacaataattgaaatttaaaaaattcaatggatggtctcaacatgaaggggacagaggaagagggatacaggaaggaatcagtaaacttgaagttagaacaacacaaattacccactctaaacaatggagagaaaacagaccaaaagaagaaaaaaagaaaaaagaccagagacttagggacttttgggaccctaacaaagatataacattcatgtcatcagactctcgaaaggaggggagaaagagggtgagactaaaaagtattcaaataaataatggccaaaaattccaaatttggcaaatgctatatgcctataaattcaagaagctgagcgaacaccaaacagaataaactcaaagaaatccacaccaagatacataatagtcaaacttctgaaagcaaaatgcaaagaatgtatcttcaaagcagtgagaaaggacaacttacctataggggaagaacaatttgaatgactgcagatttctcctcagaaacaatggaggtcaaaagaaaataacatgacaaatttcaagtgctgaaagacaaggactgtcaactcagaattctatatctagtgaaaatatcctttaggaatgaaggggaaatctggacattttcagatgaggaaaagctcagaggatgttttgctagcaggctaatataaaagagtggctaaagaaaactctccaagtagaaatgatatgataaaataatgagtcttggaatatcaagaaggaataaagaaaaaaggaaagagtgaaaatttggatcaatacagtacatttccctcacctcttgagttttctaaattctgtttgatggtcaaataagaaattacaacattttctaatgttataattgagatgagagttccagttccccactagttttaaatgtgtgtacaggaatatttaagacaattacaaataggggagggcaaaggggcataaaaggaggtaaggtttctatgcttcacttgaactgttaaaatgtcaacaccagtagttctgtctatataatgtctatataataagttatatctatataatgtaatacctcaagcaaccactaagaaagctacacaaagagacatcctgaaaaaaaactatagatgaatcaaaatgaaattcaaaaaaaatccacaggaatacagggggaaaaaaagagagaaagaaaaaacagaaggaacaaacagaaattaaaatagcagacttaagttctaatatgtcaataattacaattaatgtaagtggcctaaacatgccaatgaaaagaaagagatcagcagaatgggttgaaaaatatggcccaactatatgctgtctactagaaactgacttcaagtataatttaggtaggttgaaagtaaaaggacctaaaaaggtatataacatgcaaacattacttaaaagaaaaaaggaatgggtataatcatatcagaaaaagtagacttcagagcaaagaaaataaccagagacagagaggtacattacctctctgttgataaaagggtcaattcaccaaaaggacatagcaatcatgattgtgtatgcaccacacaaaagagctgcaaaatatgtgaagcaagaatttatagaactgaaaggagagatacaaaaattcccaattatagttggagacttcagcacttccctctcaacaattgatagaaaaacgagacagaaaatcagcaaggatatgggagaactgaaaaatacaaccaaccaacagaacccagccaacatttacagaacacccaacaacagcaggatgcacattctcttcaagtatccgtggaacatattccaagatagaccatatcttggaccacagaacaaacttgaacaaatttaaaagaactgaaatcttacagagtatagtttctgaccacgatgggatcaaactagaaattaacagcagaaagataataggaaaatcttcaaacatttggaaactaaacaacaaacttctaaatgatcagtgggtcaaagaagaagtctcaagagcaatcagaatccactaaaaaaactgttagaactgataacaaaggccaggtgtggtggctcatgcatgtaatcctagcactgtaggagatcaaggcaggcagatcacttgaggtcaggagttcaagaccagcctggccaatatggtgaaaccctgtctctactaaaaatacaaaaattagccaggcatggtgggggggcgcctgtaatcccagctactcaggaggctgaggcagcagaattgcttgaacctgggaggcagaggttgcagtgagccaaggtcgtgccactgtactccagcctgggcaacagagcgagacttcatttcaaaaaaaaaaaaaaagaaagaactgataacaaaattttgcaaggtaatcagttacaaaataaatacataaaaagtgatggttcacgcctgtaatcccagcactttgggaggccaaggtgggtggatcacttgaggtcagaagtttgagaccagcctggctaacatggtgaaacctcgtctctactaaaaatacaaaaaaattagccaggtgtggtggtgcacacctgtaatctcagctactcaggaggctgaggcaggagaatcgctggaacatgggagaatcactggaacccgggaggcagaggttgcagcgagcagagatggcaccactacactgcagcctgggagacagagcgagactcagtctcaaaaaaaaaaaaaaacatgaaggcaagataatcctagtcacaacttctgtatagctatagtaaccaagtttgtatagtattttctatattcttgaataagtagatgtaatatgggaagaaatccattaatcctcagataaatctgtaaatataaagcaattccaattaaatccttatggaattcgcctggaaaagaaacacctgactcaggcgtgaacattatgcaaaatggggtgagagtcaccataacagatatagacatgacttataaagtttcaataattaaagtattttacagagagaggccagtgtaacagattagaaaacctagaatcaggtccaagtgtatgtacgaatttagtataagtacataaatgttttatatattttgactggttttctaattattcatggcagaagggtaaatcgggcctctttatctcccttaggccagaaacagacatccctggctgctttcagagagtagactgcagagggtctaggacataaaggggagacccactctggggtctgtggggatccaggtgagagttgaccatagtttggaacaggagagtaacagatctctacaaaatgtgctttgattccaaatgagtttggaagacaaaaaagacagcttgctgatgaattacatagatatgggggtgagagagaaaccatgggttccaggatgacacagctactggaagaatagaggcgtccagtcctgagatgggcaagtcttagggtgattcaggccagcacctattagacatccaaacgaagatgtggggtatgcagaaaacacagaacatgcagatgagcaggcacatctgtttttccaactttccatcatgcattattctacttttatatgattttattacctgaaaaagttactgaaaaagccattgtctatatttcattgaattcagaacttcaggattatcctcatttctcaagttagcagatttgccctttaacagttcaaaagagattgagagtggctcatgcctgtaataccagcactttgggaagctgaggcgggtagattgcccgagctcaggagttcaagtccagcctggggaacatggcgaaactccacctctatgaaaaatacaaaagattagccgggcatggtggcaggcacctgtaatcccagctactcgggaggctgaggtgagaagatcacttgaacccaaaaggtggaggttgcagtgagccgagatcatgccactgcactccagcctgggtgacaaagccagactccgtctccagagagagagagaaaaatgcatgtgaatgtatgtgaggaggcagactcagaatttagagtcctggagaaaccctccccaggaggaagtggggaccacacagcacagctgacaggcccacactcccactgaggaagacccccaccctcccaagttttcctttttctccttttttaagtgcagaacccaaagagggagaaagactttccctcactctgctcacaaagacaaaatggcagcttaaacatgggagagacctggttagaccaaacattccagacaaggaagtgggttgaatgtcataaacatttattgagcccttgctacttgccaggtataggcaagtacaagctacaaataggaatataacaaggaatttgtaatgcggtagggagaaaaattaaaatcatgagcaagaaggggaaaggatttgcaactttatcaaatgtgtagcttttaactatcgccactatcgagaaccaaaactttttcattaacaagtttatctcatgccacccctttagagccacatcctaacccttgataaccactaagctgttctgttatttcaagaatgttacaagaatagaatgataccgtatgtaaccttctgagattggatctttacatttaccatagttcccttgacatccacccaagttccaagttgttgcattaacaatggtttcttttttaaaaaatttcaacctttattttggatacagggtacatgtgcaagtttgtcacttggctatattgtgtgatgctgaggtttagggtacagatcccatcactcaagtagtaaatatagtacccaataggtagtttttcatccgatgctctagtggtccccagtgtctatcattcccatgtttacgtccatgtatgctcaatgttcagctcccacttacaagtgagtgcatatggtatttggttttctgttctgcattaattcacttaggataatggcctccaggtgcatccatgttgctgcaaaggacataattttgtcctttttccgggctgcatgggattccatggtgtatggatgccatattttctttatccaatccaccattgatgggcatctgcattgattcatgtctttgctattgtgaatagcacagggatgaacatacgagcacatgtctctttggcagaatgcctgtgtcttttaattgctgagtctctcactctgctttatgcccctcaaatgaattctttccttcaaggaggcaagaatcaagttgctacagacctgtatggatttgctgctgctcacagtatgagtatgcctggataattcaggtctaactcagggctaactacagcatctcatattgggaaccttgctctctaaaggcctctaagctcacaaatattgtgaaattgtagggaaactccaagatcccctaaataacggtgaagcagagtggcaatagaggattaggacctaaaagtttcacatgagctgcaaaagacacaaacagtctacatgaaaaaaaaccatgtgctttaagaactacctaagattcctgggcccaatatagtggaccaggcagttatgatttatgttctctttgccttagccagagacccaacaggaaatagaaagatactcaaattgaatcgctcaaggagagtttaataaagggattacttacaaacatgtgggcagggtatggagaaacacaaagcatgggcagtaccccggggccagaaaaagcaggggtcctttgccgtgactggcttggaaaggtgaggctcctgccatctcaagccagaaggctgtgtcaagaggccaccatgaaaaagctgtggcccttagtaagggactcagccagcctgagacaacctcacagggaggttgttgaaggcataaatgccctggcctcactttttcctctttctgaccttctgctgggactccccattggctgaatccaaccagaaggcaaagggaaggaagctggttaatgtgtctatatggtcagcctcttcaaacaaagataacggtgggaaaggatgaagatgagatgggaggactggcaaatggaagacacctggcatacccttcctcctgacacccaggggaagtgatggtaaaagaacagaaaagattcactctcacactatgagaacaggagagggatcactggtgggtcactgagtttccccaaagatttagttgaaaggtatagacagatgtgaattagctggagagggaaggcagagaaagccacagcttgaacacaggtcgggggggtctgtgtctgagagtaggaaactgcccatgagaagttctagtttcagaagtgtcaagcttgacaaccaaaaagtgagcagtggggctggcaataggggaaataattaaagggtctgtattctgaataatcaaccctgccgtatgcctcctcaattccaaatgctaaaaaggccagcagccaggtaataattctgcccttggcagatgggcataacatcaatcttcaaggtaacaggagctctcaacaaaggggggcaagctgaatgtagaaggcccaacctgaattcaccattgtaaaatttcagaataccaagaaaagacttctgaaagaagaagtcagctatgcaaaataaaagaatcagagtcaggttacttttcctgtgagcaatactagatgctagaggacaatgcggtgtgactttcagatttctgaaggaatttattttatacccagaattctatacccagccaaattatccaccaagttcaaggtaaaaataaaggtagttttcagacatgccaatactcggaaagtttctctcccacatacctcttctggggaagttacttaaggatttagtcttgcctcagaaaggtctagctgacatggaagaagacaaggaacttggagagcaggaaggaatccaaatgtcagttgtatggcagccagaggagccaccatccctgcctggagcatcaaaacaacaggcttcagatgggagatgtccaagggaaaaagtgagtgaattccatgggagcctatgactaggctttgtaacggtcgagaatgtgaaaaatgcatagaatgcaaggcaagaaaaaaaaaaagacagctagagtctctaggaaaacctaacagatgcgtaataaagtcataacaaaatattatgaaatcaggacagatttgagcagaagtcagtggagttagaatacaataaattatatggaatttattggtaataggaaaaaaacctggaagttattagtgatacaatgaaaaaaacacgtttcttccctcatcaagagcaaagaagggtgaccagcaaaggggatgggggaaattatacaagaaaggtgtcatctaaacataatgtagaaaatatgtcatgaatgtgagcaattaatcaggtgtaagaacaaattcttttggacattcttctgtgagtagcacagaagtgggaatattaagatagctgggaagaatgtagtcatcgattcttcttggctctggagcaaacaatactgtttataacatacatgtacttcagtggcccacctgtgatccctctcctgttatcgaagtgtgagagtgaatcttttctattcttttaccatcatttccctgggatgtcaggaggaagggtatgccacatatcttccatttgctgctcctcccatcttctcttcatcccttcccaccattatccttgttccaggaggctgaccgtatagacagacatattaaccagcttccttgctgtgtgccttctggttggattcagccaatggggagccccggcagatgattagagagagaaaagagtgaggccagggcatttacttgctgcctgggactctccccagatattctcatggcttattcccttacctccttcagggttttcctcaaatatcaccttttagagagagcttttctgactattctatctaaattgtgacacacacacatattccctatacaccttatagcttaatgtttttctaagcacagccagcatactacatattttgcttcttcatcttgttttttatctcccacattagaaagtaggttccatgaggacagagattttctactcttatgtttattgtggtttctccaccaccaggggcagggacttgctcagggtaggaactgaataaatatttgttgaattaataaatgttgaataaagttgtaggcaagtcacttaaggaatatttgggtttgtgtgacagaaagtaaacgtcattacacttggcaatgtaaaggtaaaagcataggccaggcaaggtggctcacacatgtaatcccagcactttggagtccaaggtgggcggatcacctgagggcaggagttcaagaccagcctgggcaacatggtgaaaccccgtctctactaaaagtacaaaaattagccaggcatggaggtgcacacccatagttccagctactcgggaggctgaggcacaagaatcacttgaactcaggaagcagaggttgcagtgagccaagatcatgccactgcactcaagcctgggcaacagagtgagattctgtctcaaaaaaataagataaaataaaataaaataaaggcacagctcacagaagttgggggctgggaaggcaaaaaaatgcagaaggaagaagaaggttaggagtgctaatattctcaatttattatgtggacaatcaagatactattgataaaataaaaagtaaaggtttaataaggttacttaaccttattaataaccttataaaggtagcaattaaaatattcaaacataataatgtaatcatattggtatgagtgagccagagaaggtgaaagacatagattgagttaaatttcatccaaatttcaattcaacatagcaaaaagctactatagtttttaagttgagacatccagaagtataagcataagagtagtatttagagtatggcaatgaacttaacaaccttatactagaaatagttaaacacagtggctgtgatatggtggtttcaataatgaaagactacattttatcaaactaatacttctatagataataattatagactctggacaaaatgtaaagaaactatctgaaggcattagaaagtgacccaaagcacacatacaaatggcaactgcaataggtaagatcaatgtccttaaattttccctgaaggcactctctagtctgcaagaggtagagaagctaaaaatgaaacagaaagcctgaacagcaagagaggctgaaaattgagggggagaaaacccaggggaaaaaaaaagaatccaaataaagagtccttaaatttgcatataaactcctctcaaatccttagctgaactgtgcacattcagggaaactctaggaagccttctgaaaggcaacagctgggagactgaaaagcttgagcagagatttcaactgtcacccactacaggagagacagtttggatttggaatcctaccaagttagagggacttagcaaacactcaggctttccatcaaaaccacagaagggctgtgatttagaaggtagaatatgccccaagactgaggggttaccctgagactaagaggaaaactgaaacacacttacctaacgaagtctgaaatgaagaatcctcaagttcatggtgacaggccactaattagactgcttgatagaacaaaaagaaacaaacttcagagacgtataaaagaatctagagtttctacagtgtgtcatgcaaaatatccagtatacaattaaaaaaaaaagacatacaaaaacaggaaaatgtggtcaatagtcagaaaaaccttactcaataaaagtagataatcttgttaaaattggtagacaaagatgttaaagcgaagatgttaaatattcaaagaattaaaggaaatttcagcagagaaatgcaaactacagaaattttagaactgaaaagtaaagtatctgaaataaaaaatgtactggataattttaacaataaattagatactgcagaagtgagagtaagtatagtttaagatggatcaacagaaattacccagtatgaaaaacagaaataaaaagttgaaagaagaaaaaacactaaagtctcaatgaattctgagagaatatcaagtggtctgacaacatgtgcaattcaagtccaagaaggaaagggcaaggagcaaagaaaatttgaaaaaataatgccccaaatctctcaaatttggtaaaacaaaaaacaaacacacaagcaaagcttatacattcaagaagctcagtatgtaccaaaaagagcagatacaaagaaaatcacacttagtcacatcataaccaaaccacccaagctaaatataaaaagaaaatgttgaaagcagccagagagggaaaaaagacacattacacacagggtacaaagataagaataatcactggtgcctcataagaaataatgaagtccaattgacaatggaatgacatctccaaagtgttgaagaaaaatgtcaacactgagttctatattcagtgcaacagagatggaataaagtcatctgaaaatatctttattccatccccaaaatgagattgagtaaagatattttcagataaacacaagctaaaagaatttgtcaccactagacttgtactacaagaaatgctaaaggaagttcttcaggctaaaggaaaatgataccagatgggaacttgaatctacaggaataaagagcgctaaaaatggtaaacaactaggtaaacatacccaggcttttttcctcccataacttgcttttaaaaatgattatttaaagccaaataatagcactataaggtggggcttacatagtacgtggaaataaaggacatgacaagagcataaaagatggcataagagactagataaataaaatgaatctattgtaatgttactgtatttgtgaagtgtgagatatgaactctaaagtgggaacggtaaggtatgaaatgagaggtggtagctgtgaaattttcagtgagaaatgatacaatataaatctaaataggctttgacaagaatgcacgttgctagttttagagtaactattaaaaaataaaaacagctttaaaaactgtagctaaaaaaacagtaaaggaaataaaattcaattcagaaaacattcaattaatctaaaagaaggaagactaaaatgatcaaagacagaggaagaaaacaaaacaaataacaagatgctagacttacactcaactaccccagtaattgcattaaatgtaaatgatatatttatttcaattaaaaggcaaagaatgtcagattgtatacaaaagcagtatccaattaaagctacctatataagatgaactttaaatataaaaataaagtgtggttaaaagtgtggaaaaatacattccatgtacacagtaaacattaaaaggctgccatgcctattttaacatcaaaaaagtagacttcaagacaataagcattactagagacaaagtggcatatttcataatgataaaagagtaattcattaagatagtataattgtactaatcgtgtgtgtacctaataacagaacttcaaaacagatgaagtaaaacctatcagaagtaaaggggaaatcaatgtatcgaagagatatttgcactcccatggttgttgcagcactgttcacaatagccaagatttggaatattttaagtgttcatcaacagaagaatagataaagaaaatgtggatatatacgatggagtactattcagtcataaaaaagagtgagatcctgtcatttgcaacgacatgaatgatactagagatcattatgttaagtgaaataagccaggcacagaaatgttatattgggtagctagtctggtattagcagggaaggaggggcctccccacaaaacacacacacaccagcagtgtcaagcaactatcgggtgatggtcaggtggttgttaactggtctctctaaagtaataattggtcacagacagtgccagggacaggcagtctcctaatagattaaaaaaaaaaaacacctgaaagatgatcagcagcttcccgataagatctcaggagttgggcgagtggggagaagtaacataagactctagaggaatgccaatgtataaagtcaaaaggttgagctgcacacttgcctttcaagttgcccactggccttcttccaagtagccaagtacttctcttcctttcattcctgtttgaaagcttttaataaactttcactcctgctccaaaatttgccttggtctctccttctgccttatgctcctcaaattctttcttctgaggaggcaagaactgaggttgctgcagaacctcacggatatggattcaccaccggtaacatattttggtgctgtgtgattcagataccttccaccagtaacataaagacaaacatcacatattttcatttatttgtgggagctaaaaatcaaaacaattgaactcatggacacaatgtaaaaggttggttaccagaggctgggaacgtagtggggcagagtgggaaggaagtggggatggttagtaggtataaaaaaagaaatagaaagaaggaataagacctatgatttgttagcacaacaggatgactatagtcaataataacttgtttgtacattttaaaataaccaaaagagtgtaactggattgtttgtaacacaaaaaataaatgctgagaagatggatacctcattgtatgagtccatttttacacagctgataaagacatacccaagactgggtaatttgtaaagaaaaagagatttgatggactaagagttccatgtggctggggaggcctcacagtcatggtggaaggtgaaaggcacatcttacatggctgcaggcaagagagaatgagagccaagcaaaaggggtttccccttatgaaaccatcagatctcgtgagacttattcactacccctccccatgaggaaaccgcccccatgattcaattatctcccaccgggtgcctcccacaacacatgggaattatgggagctacaattcaagatgagatttgggtggggacacagccaaaccatatcactcattctccgtgatatgattattacgtagtgcttgcctgtatcaaaacatctcatgtaccccataaatatacacacctaccataaacccacaaaaattgaaaactaaaaaaaatcttgagaaaagaagtaaagggtcaagtcaacagcctctcacaatcacagttggctatattaacacccttctctcagtaactgatagaacacataaactgaaaatctaaagaacactatcaaataattttatctaattaacatttactgaccaccattcttaccaaattcagaatgtacactgttttcaaattcatgtgcaacattcaccaagataggaccatatgctgggccttaaaataagtctcaatgaatgtcaaaagagaggatggtcttaccacacaatatacaattacgtcttacaattacgtcaataattgtaagatatctaggaaatctccaaatgtttaaacagggtacttccaaacaaactacagctcaaagaataaacacaatggaaattataaagtatttaaaagtgagtgataattcaaacaacacacaaagttagaaaacatagttaaagctgtgcttagagagcaatttacaatgtaaatgtctatgttaggaaagaacgaattaaaatcaacatttaaagttaatattttaagaagccagttaaagaaaaacaaatacaaaacagacaaaaagaaaaaaataacaaatccaaaatgtagttccctgaagtgattaataaattgataaaaataagtaggactaatcaagaaaaaaagagagaagacacaaattaccaacatcagaaatgaaagagaaaggtcaggtatggtggcacatgcctgtaatcccagcacttccggaggctgaggtaggaggattgcttgagcccaggagtttaagaccagcctgggcaatatagtgagacatcatttcttattaaaaaaaaaaaaaaagttaaattagcttgtcatggtggcccatgcctgtagtcccagctacttcggaggctgagatgggaagatggctccagcccaattaagtaaaaggacaattaagtagtggttaaatttcttgaaaaacacaatttaccaaaggacatttaagaagaaatggaaaatctgaattgacttctatctataaaggaaattgagctcataatcaaaaatcttcccacaaaacaactccaggcccatgttatttcactggtaaattttatcaataactttaaaggaaaaaataataccaattttatagaaaccttttcagaaaatggagaaggaaagaatgctttcaaactcactttatgaggccagcataacttttatatatttgtagccctggtaagtataagttcatttttcaataaagatgcaaatgttattcaatgaagtaaagaataatcttttcaataaatgataagaaacaactggatttctatatctacatgtctttttatatataaatatggttatggattttttttttttttaagacagactcttgctctgtggctcaggctagagtacagtggctcaatttcggctcactgcaacctccacctcccgggttcaagcaattctccctgcctcagcttccggagtagctgggactacaggcgcccgccacgcctggctaacttttgtatttttcagtagagatggggtttcaccatgttggccaggctggtctccaacacctgatctcaggtgatccaccaacctcagcctcccaaagtgctgggattacaggcatgagccactgcacccagccggttatggatttttaaagagaacctcacttagttcctcacacatatgcaaaaattaatttgaaatgtatcatagacctaaacttataagataaatcacataacatataaaaatttttcataatcttgaagtaggcaaagatttcttagaacacaaaaaacactaactgtaagagaaaaaaaattggaagttgaacttcatcaaaattttaaacctcggctaagcaaaagattgccaacaagacaaagatgcctacttttataacttctcttcaatgttgtactggaggttctggccagggaagttaggcaagcaaaagaaacacaagacacccagactcgaaagtctgaaatagaactatctttattttcagacaacataatctcatatacagaaaatcctttaaaaaatctatttttaaaaaatgactaataaatgaattcagcaaggcggcaggataaatcaacatagagaaatcaattgtatgtctatacgttaacaatggcaatctaaaatgaaattaagaaagcagttccattcacaatatggaatcaaaaagaataaaatatttagggacaaatttaacaaaagaagtgcaaagcttacactctgaaaactacaaaactttgttgaaagaaattaagaagatctaaataaatggagagagacattacattttcaaaggctggaagacttggtattattaggatgacaattctccacaaattgatctaagactcaatgcaatccttattaaaacctcagttggatatttttgtagaaattgacaaactgatctaaagttcatatagaaatgcaaaatccacagaatagcaaaaacaatctggaaatgaaaaacaaagttggaggacttattcaccctgatttcaaagcttaatacaaaactcctatactcaagacagtgtggtgctgacataaggagagacatttagatcaatggaagagaattcagagtccagaaataaccctttacagtcattatcaattgcttttcaacaagggtacccaaacaatccaatgggggaaagaataatcttttcaacgaatgttgctgggacaattgtacagccacatgtaaaagtatgtgtggacccttccctcacaccatacacaaaattaaacttgaaatggatcatggactataatgtaagagctaaaactgtgaaactcttagaagaaagcatgagtaaatcagtgatcttaggtttcttgaagaatgatatcaaaaacacgagataaaataaaaaattgatcaattggactttattactccctctagtggatccaaaatataaccatatttataactatttcatcttttaaaaacaatagtaaaagatatttccataacaattcttctactcagtggtcattttcatggtcattatggtgaattacttttgctttcctgtatagcatggccaaggggcgtgaaggtattttcaggggtgatagaaatgatgtgtgtcttgaacgtggcggtagttacaccactgcaccaatttttatcaaaaccacttggcttgaagacttaaagtctgtgtacgtatttcaccatatgtaaattttacctcaataaaaatttcattttacaaagtgatcgctctgaggagcagaagacgagcttttcactgcaagcctttcagtacttcttaaaatttttaaaagcgtgtgtataaattactttaagctctttaagttttgaaaaataaaacatgttccaatttgaagcttcttattatccttgcttcatagaaaacagaagatgagaagaactctcttgtttgagagggtatcatttagcatcaataacaaggttttcctctcttccttccctggcgttcccccagagtcacagcaccagtccagggagaccacggggaggtccgggagcaggttctgagtcagaagaaggcttgcttttaaaagctgtgatggaaacgaagttgtaatcatttattccctgtcgtggagctactgtaccaaacacagaatctctaggaaatgaaagtcagaatctcaaaagcttcagtttttgaatgctaaagcttatttgcatatcaatattgcctcaggacaatacgcagaattagaaaattaaggaactacattagaagagagagaaagaaataggacaaatgcgtggaagtatagagctcccctctgtcatctagtaaaagtcataaataaaaagccacactcaactccatggctggtgaattttgataatactgttaccaaaattttatttacaaactcagtaacaaacaaatttttttcattaaaaaatacacatctgtacagcattactccctctagtggatctaaaaaaataaccatattgataagaatttcatccatcttttggggaacaatagtaaaagaaattttcataataatcatcatgctgatcagtgtttattttaatggttaatctgaattaatttttcttttctgtgtagtatactttttctttccatacactctcctgtaaaaaaaggtacttaacatttaccagaataattaattactcataaattagaaaatgacagacatttcaaacattacttacaaggataaaaattcaaaaactattgaaggtagtattatactcaacataaatcgtaaatattcaatgagtttcgcagtcactttaaagtaatgtgcaactgagagggtcattgtaatagtctattcacccacgaactgtttaaaattgggttagtgatcatttttaacccatttatgctggaggttgcaattttttgaatttttgcataagtgaaaaatcagaccttggcgctgaccttgagcagtaggatataaataactcccacaggcttggtgttccaatagtggaacactaggcataaaataataagtaatcattcaagtttcatgtctacttattttataaagtaaattttcgaatataatgcaagtattcattagatcctcaaatctcatttgttgcttagagggtttttgtgaacattttttcatgccatcactgtgtcttatatttgggagcagagaggtaacatataaataaaaagatgacacgtgtgtgttggcttaacttttgagtttgtcacaactcagtcacagatgttgctactagggaacagacacctaaaaaggggtaaaaaaaaaaataatgatgttcagttgagctgatctctgtagcctaatccaagtgaaattttaataattagacagcaatccctgctattagatgatctgggactggttttactatcgcaaataactgaatggagtttcacgtatctttttagaatgaagaatttgaaatgacaacaccaccttagaggtgtggggctcttgcagaagtgaatttaggtaaaagactgatgacaaggtttcgttttgtctgagaagtaacatttaacggcaggcaaagagatacatttcccaccaaaatcgaatgccactaccatctgcaaccccacagaggctcagctacctaaaatggaaatgaaaatataatgtatggaaatattctcttagaaaaactccttaaggcttcacatgtattaatgtattagtttgcaaacattaagatcaaagccaaagcaacaaatacatcctaaaaagtttttcgtcagatttttattaacgatatacaagtagcagggcataaaaaattaataggcccaagcgttgaaatgtcaaacccaatgatctcttccatgctcacctcttttgcttttttgtttcagtcttgctggcaccgggtcttcttgccttgagcaactctacacggttaagaaaaggagaaagaaaggttaacagatggtttaagagcccctcatctgttgcagtaagttaaaaaatagcaaaggaaggagaataggatccaaggtgtcaaaaacgcaaggcctaaattcatagacgtgtaatttcaagcctttgggcttacccaataaaccgttaaatattcagttttaaataaaatctactgtaggtttctttaaaaaaaaaaaccaatttgcttataatattgctaactcaagtttaaaatacagtttctcttcctttttaagtctttaaaatgctgtacattgtccttctaccctcattagcctctctatataattccatgcacccaaatcttttatttccaagaagcctaactaatctgatggagcagccaccacaaagcagagatagaaatgtggtactcactcctgtagtcccagcactttgggaggccgaggtgggcggatcacttgagcccaggagttcgagaccagcctggccaacatggtgaaaccccatctctactaaaaatacaaaaaaaattagccaggcatggtggcacatgcctgtaatctgagctactcggggggctgaggcaggagaatggcttgaacccgggaggcggaggttgcagtgagccatgatcgtaccactacactccagcctgggcgacagagcgagactccgtctccaaaaaaaaaaaaagaaaaaagaaaaaagaaatgtgcctaacacacacttctcacatatcccatggtgccaaacttttagaccccaaatcacttcgacaatgaaatcaaacctgaattgctaacagttatttgcacaacatctgtctcagatataagccagcaacacaaggccggacatcctccttccatgctgtttagcatgtgctgatataggaaaggcctaaagaactatgtgaatgctgggtgtggtggctcagcctataatcccagcactttgggaggccaaggcagctggatcacttgaggtctggagttcgagaccagcctgggcaacatggtgaaacccccatctctactaaaaatataaaaattagccaggcatgatggtgcatgcctatagtcccagctactcaggaggctgaggcagaagaatcacttgaatccgggaggcagagatcacaccactgcactccagcctgggtgacagagcaagactccatctcaaaataaataaataaattttgacttgaaattccaaaagaaaaattttgcctgtttctaatctatattgattagcaatatattgtaaacagaacaaatgaagaatgaccatactaaagctgaaacactctgcttaaagagagaacaatggcagacaccatcatcagagggacctggaagaggacactgaccccagcagggagttgtgatggaagaggagacagcttcactgtgtacagaagaataagcttcctactactggactgggggtggctcccatccccgggaccagtgtctgtctccagtcctgagcgagtcaaggtagagacactgagtatgcctaggattggatggtctgaataattccagctgtttctgggctataggaaagatctctggttgtcctgtacctggccctggggtgacttagtacatggggaatattggcttggtgtgtgagaatttgataaaggagatggttgtgggttgggctctggattggttggtttgtatgttaaaggcatgcttgcaggggagtccttggctatctctaggaattatctctagtgctggaaggggcagtctctccaggatcaaggcccgcaaatgcttgagcatgaagaatctagaaaatgagaaaacagagtcaatacagagtagaaatggtaagtctatctaactcttgagaaattttgccataaaggggagcagggaaacgtggttatagacggggcagacatgatacaagaagtgcttttttttttttgagatggagtctcaccctgtcatccaggctggagtgcagtggcatgatctcagctcactgccacctctacctcccaggttcaagcaattctcctgccttggcctcccgagtagctggaattacaggcatgcaccaccactccccactaatgtttgtatttttaatagagacaaggtttctccatgttggccaggctgatctcaaactcctgatcttaagtgatccgcccacctcgtcctctcaaagtgctgggattataggtgtgaaccactgcccctgccaagaagtgcttttaataagagagagagtataacatgcttttatgctgctgggaagcaaggagttgagagaaaaagcaatgagtgggagaatgaagagatgagccactgagcgggaggagagatggggcgcagtgtgtgagtaggggctgcttacagccccaggagagccagggtgggaacagaggcggggaggctggtgtttttgatttcatggctggatgatgagacagttctcattttactgcttcttgtttctcagtgaaacagacaaggtcatctactgaaacatgaggaagggaaagggtgttgatgattgaaggagaaggcatgaaacaccagttttggagagtggcagagtgagccaactggagagatggatttgtgttgctgagccgtgctacaggcccacttgtggtttgtggtccttaagttaaagttgggctaagttaggatggtattggttgagggagttctgagtatttattctaagaagagggtatagctccgagtattctaaaaagagagtgtaactatctacacacatatagatagttgtatttctggctacctaaagaggaccggaatgatttagctcaaatgagaaaagaaattgtctccgtgaagtgaagttatgggtagtctttcttaacctctttccatgtttcagaattttcataagatgttccaaacagtatgtatttcaatatataaacagatgaaaacaataaagctatttcagaaatcggggaaaaaaattaaaaacccaacaaaatgaggttttgctgggaaagaaagcagctaacctaatttcctgtagaaaaactgctatcctaaatgtgaatgctttcttgactattaatttggatataattataaccctctacaacaggagaaagactaatgaatcacaggggaaaaaatgaaggaaaagcacaatactgcaaaaacataccaaagacaaaactgcaaagctactgaaaacataaaaggatgtcttaacaggatactcatgtcctcttgggagacttccaggtgaaatgattgaagatgattttccagccgttcctggaaggtggggtaaagaaagaggaaaaatttcctggcacgtcagtctatgaaataatataatgcaatatgaggggaatcttggacgggctgatacgaagtcagaaacccatgcaagggttgcaatctgtttcctgtttctctgcagtcctactctgttctgtgatggctgggacagatggggccccacagccccttccttgtcacatggcagactgagcaaaggggactgatttgggagggaatggggcgcctccagctttctgggcactgcaggccagcgggttatggaaggtcccgcttgccctgggcagccatgccagctggtggctggtgctttggaaaggtcctcactgtcagccacagttgcttaatctaaaaacccaatcttctgaaagtgtcagtgctgttggagctcaacgtctgtaagcttggccaaatatgtcaagaaggaccgacctgtgggcttagggggaaaaaagcaaatgaatgccaagtttacacagataggccacattttagtttacttttactaaatcttagcctttcattttgttggaagacatggagaaggcacacgatggaaagacccttcacctcctcccactttaaattttagggatgataaattaccgtgaaattaatttagttttgctattacacttttaccgtgagtcccgagccaaggacatttttatgttaaagtctttgtagatgtcatgtttttgtatgcctgaaatacctctgtgtataatattgatattggaaaaaaatctattaatattttgtaaaatgatatgtctggtatggcatttgacttcttctgggggaaaagaacataattgtgcaaaatgttagaaattctactatcgagactgcacaagtatgacagatacactaattccagtaagtataggtagagatcttcatgaatggggaactacatttgaaaagatcatttctgatataattggaaatcggggggattcttaagactctccaaaaaaacccacttttcctgagtactttgctttttaggcagaaaaagaattaactcctaaagccatcccactggcacaaagagagtcaggggttctctctggaattttgttataatagggctcagcacattctagcgtgattgttagtttcagacacttgccacctgtgtgcagttggtgaaagtaagaggaatgctactttgcctgacctcgtttaagaacaagaacaaacattcttttagagtttaaaactcaggactcatgctttaatctttcaaactcccatcttcccagggcgccctcagctttcatcagtgcttttctcatagtcatgcctcttatagttttataattttttaaaaggcaatactagatgagtttaaggcgctggtatccattttccattaaataaagtgtcaaaacttctgatactatactgtagagtcaccaccatgccaacagttttaatttcaaacacattttccccattctgatgatattagaacttcacccatggcactactaccttataacttttatttttaattaaagaagttaaattggcaacagaaaacactttgctttcacattagctttgttaataaaaagtgaacgtttaaagcagtgtacctgtggatgaaatcaagttccaagctccagtttcccctttatctcatgaaggcatcaagctaaaggtctatgcttatgacaatcttaaaacaaaaggaacaaggaaagatgaaaatatttaaaacccaactattttcagctgatggcaagtcaaaaaactacacgagatattttaatacagcaaagattccatccttctagatgctttgcaaaatgatattagataactaatcatgagaggcagcgaaaacctcaaagcaagtgaaataaaaataattataattaaagactgggtgtagcagctcacgtctgtattcccagcattttgggaggctgaggcaggcacattacttcaggtcaggagtttgagaccagcctggccaatatggtaaaaccctgtctctactaaaaatacaaaaattatccagatgtggtggcaggcgcctgcagtcccagctactcaggaggttgaggcaccaaaatcgcttgaacccgggaggcagaggttgtagtgagccgagaccgtgccactacacttcagtctgtgtgacagagcaagactctgtctcaaaataataataataataattattattattattaaagggaaacatggtagatattgatacataagaaggaaaacctacaattatcatataattaaagaagtaacattgaggcaatatagaacaatatacagaggtaaagcgtttccactatcatagtagaaacaaattaaaatacttttgatttggttaacataaagggaggaaaacaatctggatgtcttttttaccagtttattattattaaagcatgaatacttggggtttatgtaaactggtaaagaagatattcagattctctctatatatgtctaaagatatatatatgtataatatattacatatattcattatatattatcttacatttctatcacttacatattatgtaaatattcattcattctaaaattggaaaaatgctctatttctaatcaggctggaaaaacaaaataccagatttcaaattattcctctaaacttcttccacttttaaaaatagatacccttgtttattaaaaaaaacaaacaaaaagccttaaagcttgaagtgatactaaaaactcaaccatcataataaccaagaaaaatagtcaaaattatcttaagacacaattttattagacttcgtgaaggaaaactggaggagtgaccatgtggtcacctcccctctctctctccctcttaaaaccatgctaaaattgtaaggaactctaaacaaacgtgtaatttcatgaagatgaagagaactgaaaagaaatacatacacatgtagatagatgtgtcaagtgtgggccggatgtggtggttcatgcctgtaatcccagtgctttcgaggccaaggacctcttgagtcccagcgtttaagaccagcctgggcaactaacaagaccccatctctttagaaattagttgggtggggtggcatgtgcctgtagtcccagctactcaggaggctgaggctggaggatggaaacatggtagaagtagatgcagaaggaaaatctacaattaggctgaactacaattagggtgagcctcccaggcttgagcccaggagttggagactgcaatgaactatgatcacaccactgtactctagcctgggtgacagaggaagatcctatctttaaaaaaaaaaaaaaaagagagagagagagaaagaaaaaaaagtggatgaaggagttccagttctactgctgagatggagaaagaacactctagcctatctctcccactgaacggagctataaaacatacacagcatgcatggattagttctttgaggattccaaagggaacatgataaattaaagaaaaataacataatttgaagtatcaccaaaccttttttttttcccctccagtatcccccagcctggatgagacacagctggagcctggaatggacatggagcagacagagagcttcaggacacacccgctcattctggcttgaggagcaggaaaggcatctgccaacactccgagttaagtagaaatattacccacaccccatcatcaaatttttgtcattcattccctcacacctcagcccagagctacccacaggtgcctaaaattctgagggagaggaaatttcctctctaatcaggggatgtcccccaacaggaagggacaaatcttgtgtctacttgctcttccttccttctctccttctgtcttcccctctgtctctctttctctctcctctcccaactcttggccatgggaagtgcatggcagagcatgataaataaagcctccgctttctgacctgagaactgaaaatggagcacccagagaacataaaagtacctgagagatggtgaagaaatacgagttggagaagaccaccccataaagtcatttatgaactcctgggcaagcttccgagctgcacatgcatggatctaatcccaaaccactcaccatagacgtcgtgaactgaacaacagaataaagcatagcccagatcccagactgaccattggtggagcacatctgggacagatctgatagcactgcaaagactttgaaaatccaattcacattgacctacaacctttacatctggttagaacatgcagcctgaatccaactaggtaggtagaggtttgatatttaaaaataactataacgtaaagggcgggggcaaggaaagtaatagtaggacctatgtggtggttagttttcttctacattgcttctggcatagtaaaatattgattctaaatagacagaaaagttaagcatgtttattgttatccctggagcaatgaaaccatactaagaaatagatatcaaaaacaaaatagatacattaaaatggaatatttaaaacctttagatattacaccaatatttgtagcaattttatttttaatagccaaaaactggaatcagcctagatgttcttaaataggtgaatggatatcttagtccattttgtactactattacggaagacttgagatcaggtaatttataacaaacagaaatgtttctcacaattctggagactgagaagtccaagatcaaggggccagcatctggcgatctggtgaaggcctttttgctgcatcatctcatggccgaagggcaaagagagagagagaaagagaggaagagggagcaaaacttgtacttttatgagaaacccactccctcgataaaagcattaatgcattcatgagggtggtgtccccatgactgaaacatctttcattaggcctcacctcccaacaacaccacattggagatcgagtttccaacatgtgaactttgggggacacgtttaaaccagttcaaggggtaagcaatctgtggtccatatataccataaaatattacccagcaataaaaagaaacaaactactgatacacacaacttaaatgaatcttgagaaattatgctgagtgcaaaaagcctatcccaaaagattacaaaatatattatttcacttatataacatttttgtttgtttcgtttttcatttatttatttctttacttattttagagacagggtttcactctgtcacccaggctaaagtgcagtggcatgatcatagctcactgcaaccttgtactcctgggctcaagtgatcctccagcctcagcctcccaagtagttgagactagaggtgcacaccatcatgcctagtagagacatggtctctctatgttgcccaggctggtcttgaactcctggcctcaagggatgctcttgccttggcctcctaaaatgctgagattacaggtgtaagctaccatacctggccaacatttttgaaatgagaaaattttaggaaaggaatgaaagattaatggttgccagcagttcagaatggggaagccagaagaaggttggtatggttttaaaaagaaaacacaagagcttctcaggttctttgtagtattggaactgttcagaatcttgagagggtgatgggaacacaaacatatacaggtgattaaattgtatagaactgaatgcacacaaataaacacaagtaaaactgggaaaatctgaataagattagtggattgtaccaatgttgaattcctggctgtgatgttatattatagttttccaaactgttatcactgaggaaaactgagaaaactgtacaagagatgtctttgaattatttgttacatcttcatgtgaaactataatttaataaaatgttcaaataaaaaatttacaaatgtttcaaaagcccaaaagaaagcaggaataggtaaacagaggaaataaaaacagagggaatgaaccgaaaaaaaattaaatggtgggccagttaacatatatttataattgattaaatgtaaacagtttagatacaccaattaaaagacagatatcgcagaatagataagagtggtctaactatatgctgtttacaagaaacttactttaaatataatagcataggtaaaagtaaaaggatggaaaacaatataccatggtaatactacaaaagaaagctcaagtaactatatcaaaattagacaaagtagatattaggccaaaaagttggtccaaaaaacagaaaggcattacttttttttttttttttttgaaacaatttctctgtgtcacctaggctggagtgcagtggtccaatcttggctcactgcaacacctgcccagaaagacattacttaatgattaaaggatcaatttaccaagaaaatatagcgatccaaaatatgtatggaactaacaatagagcttcaaaatacatgaagcaaaaaccgaactattggaaatttaaaatataatgattaaaataaaaaattcaatctgtcccaaaatctggaagttcaaatcaaagaagtttgatatacttacagaaaaatgaaggaagggaggaaagaaattaaaagaaagaaaataggagagaaattttaaaagaattagatcaactagggttggaaactatcaaaaaaacaatgcaagaacaaattccaaaactaaagacaatgatgagttgccaagccaaaatgtctccctgagaaaccagcacaattaatgaaacaatacttactccaaggttcatctctataaaatttcagaactccaaggattaaaagaaaattctaagaaaaacaggtcacatagacagaaaaagccaaatggtattggacttcttaatagcaccattggcttccattattgctattgagaagtcagctgtccgtctaaattctgttgtttttatgcaatctgcctttactccctggatatttttaaggttttacagatctcttcatattgaattatctgttatttcatcatgaaggatctcaagtggagttttattttgttttgtcctgttctctatcctacttgggattcattatgattcctgaatgtgaagtttcattttttttcatgagttctagaaaattctagtatatagctctgccatttttcttttggatactgcttctttttcattctatttattctctttttctagaattccaatgaaatgtatattaggcattcttaccctatcctttatgtcttttagcctgtgcttcatatttcctatctccttgtttctctatactggattctggatagctgagctctgctttcctgtttgctagttctctcttcagctatgtctaatccgctgtttaaccataaggttcttatttcaatgtgttttttttttcatttttagaagttctatttgaatatttttcaaaactacctgattttttttcttagtttacaattctgttttctttttttatttctttcaacatgaaagcacatttattttatattctatgtcttaaaatttatagtatctgaagtctttagggaactaatttctactctttgttgtttctgctaattttcatttgcaatggcatgtttgcttgtgtttttcttgatttttcaatatcagcttatgttcatcaggacttttctgtggggatttcatgaggcctggcttgggagtgcattcctccagagaagatctgcatttgcttcttttaggtacctgaagatattcccaatccaggaccactttacattaatttcttggcttgagggttatgtactgtgccagtgccataaattagaatgtcacaccttatgaaggctggtctgaattctaaattatcaggggaagtttctttttctaattctgcccagggtccaagctgaaaaaaccacatttccttactggatcatctcttttaactgcacagatgtgtctctagatcaacactgttcaaacctttcaactttcacaggccaaggcccttgcaccccgcaggtaaaactcaagactccaggtggtgggaaattaccaggcaaccttagatagccactttgtgacaaaaaggttttgggatatctagtctatcatattgtcagaaatggaaataaccaatccttcttttcacttcctctagattttgagtgtagaactgctgagtgaatctaagtgagacaaaatccttttcccacacaggaaaatacaatttggtgtttggaaaaaggaaattgggccaccatctttttcttagattagaggaatctaattaaactactatctcttgtaatcaagaaacatttacctgaagttcaacaatttctaccatttcattttgttatattttgaacattacattcaagcaaaattacataatgtttaataaactttattttctagaacagttctacattcatagcaaaattgagaggaaggtacagagatttcctatataccctctacccccacacacacacagcctcctctattgtcaacatctcctaccagtgtggtacatttgctataactgacgaacccacattgaaacagtattgttgcctggagtccatagtttacattagggttcattgttgatcttgtacattctataaatttgggcaaatgtgtaatgacatacatccacaattgtagtattatactaaatagttccattgccctaaaaatcctctgtgctctgcctattcatctttctgtccttactaacccctggaaaccactgacttgtttactgtctccatagttttgcccttttcaaaatgtcatgtagttggaatcatgtagtatgtagccttttcagattggcttattttacttagtaatatgcatttaagcttcctccaggtctattcatggcttggtagctcatttctttttagtgctgaataatattccattctctggatgtgccaatctataaagactgaaagaggtgcctacttcttcaaatgcacagacaccaacacaaggccacaaggagcatgagtaatcagggaaacataacaccaccaaaggaacaacataaagcaccagtaaccaatcctttaaaaatggagatctatgaactgcctgataaacaattcaaaataatcacttaaagaaactcagtaagctgcagataatacagatagataactaaacgaaatcagaaaaacagacttagaagcttaacaaatagaatagaagccatagaaaagaaccagtaagaaattctgggcctaaagaacacatgactgaactgaaaaatttcatatagagtttcaacagcagacttggtcaagtagaagaatatatgcaaatcaataaatgtaatatacacattaacagaataaaggatgaaatcacatgattatctcaaaagatgcagaaaaagcatctggcaaaattcaacatcacttcataattaaaaactcttaacagattaggtgaagaaggaatatacctcaacatgataaaagccatatgtgccaagcccacagctaacaacatactcgatggcgaaaagctaaaaggttttcttctaagatctggaataagacaatgatgccaattcaatttaataaaggcattcaaataagaaaggaagaagaaaaactggctctgtttgaagaggttgcatacagaaaattctaaagactccaccaaaacatgtttagggctaataaatgaattcagtgaggttgtgggatacaaaataaacacagaacaatcagtagtatttatatacactaacatcaaactatccaaaaagaaatcaagaaatgatcccatttataatagcaataaaaacataagattctttttttttttttttttttttgagatggagtcttgctctgtcgtccaggctggagtacagtggcacaatctcggctcaccaaaacctctgcctcccgagttcaagcaattctcctgcctcagcctcctgagtagctgggattacaggcatgagccaccatgcccagctaatttttatatttttagtagagacggggtttcaccatgttggccaggctggtgtcaaactcctgacctcaggtgatccactgccgcagtctcccaaagtgctaggattacaagcgtgagccactgtgcccggccaaaaaacataagattcttaagaataagtttaaccagggaggtgaaacatctgtacactgaaaatgataaaacattgattaaagaaattgaagaggaaacaagcaagtgaaaagatatcctatgttcaataattggaacaattaatattgttacaatgtccataataccaaagctgtctacagattcagtgcaattcctatcaaaattccactggcaattttcaaagagaaaaaaatattaaaattcatatagaactgcaaaagaccccaaatagacaaagcaatcttgaggtaaaaagaacagagctagagcaagaacactacctgacttcaaaatatactacaaagctacagtaattaaaacagcatggtagtggcataaaaacagacacacagacacagaggaacagaatagagagcccagaagtaaacttacacatttatggtcaatggatttttgacaaagataccaagaacacataatggagaaagggcagtctcttcaacaaatggtgctagaaaactgaatatctacatgcagaagaataaaactgaaccctcatctcacacaattacaaaaatcaactcaaaatggactaaagatttaaacatagacctgaaactgtaacactactagaagaaacatagggagaaatatccttgacgttggtgtgggcaatgatttcctggatatgatccccaaaacaaaggcaacaaaagcaaaaaatagacaaacaagatgacatcaaactaaacacttctgcacagaagaggaaatagtcaaagagtgaagcaacatcctacaaatgaggagaaaatatttgcaaaccacacatctgataaggagttgatatccacgctatataaggaactcaaataactcaaaagcaataaaacaaataacctgattaaaaaatgggcaaaggatctgaatagatatttctcagaagaagacatacaatggccaacaagtgtatgaaaaatgctcaacacaactaatcgtcagggaagtgcaaattaaaagcacaacgagatatcaccttaacatctgctagaatggctgctatcaaaagacaaaagataatgagtgttggtgaggacgtggagaaaggaaactcttgcacactgttggtaggaatgtaaattagtacagacatgacggaaaacaggatggacagtcctcaaaaacttaaaataagagttgttgtatgatccagctatcctactactgggtatatatccaaaggaaatgaaatccgtatgtcaaagagatatcacacactgccatgtttactgcagcattattcacaaaagccgagatatggaatcaatctaagtgtccctcaaaagataaatggataaagaaaatgcgggtgtgtgtgtgtgtgtgtgtgtgtgtatacatacaatgaaattctattcagcctttaaaaggaaaaaaatcatgccatttgcaacattgtggataacctggaggacattatgccaagtgaaataagccaggcacagaaaggcaaacactacatgatcccacttatacatgtggaactcataaaagcagaggatagaatggtggttcccggggtggggtggggcagggggatgaggacatgtcagtcaaagagtacaaagtttcagctagacaggacgaataacccctggagagttaatgcaaaaatggtgactatagttaacagtaatggattgtatacttgaaaatcattaagagcatagatcttcaatgttttcaccacaaaaaaaattgcatgataactaagtgaagaatgaatatgttaattagctaattgtgttaatcatttctcaatgtgtgtatatatacttatttatatatagcaaaatatcatgttgtatactgtaaatatatacaatttttatttatcaattatacctcaacaagctggaagaaacaaatgaagttaattctcttaaaaaataacatctcctcttgccaggcatggtagttcacacctgcaatcctagcattttgggagtccaaggcaggaggatcgcttgagaccaggagttcgagaccagcctgggcaacatggcaaaaccctgtctctacaaaaaatacaaaaattagccaggtatggtgttgcactcctgttgtcctagctactcaggaggttgaggtgggaggattgcctgagcccaggagacagaggatgcaatgagccgagatcgcaccactgcattccagcctgggcgatagagcaagacgctctctcaaaaaaaaaaaaatcctcttaaaaagatagttttatgtatctacctatgtatgtatgtatgtacctatgtatttaccttcactttcttcctaaacctcactaaaattatagtaaagttattttctcaaaaaaataaagaaatatcaccataaacctcaagaagagaaaaaaataacaacacatttttagaaactggaaagcaaatgaagaatgactttgcagatacaagaatccaaatcttgacccgagaacttacctaatgtacaccacactgccctccaaatccttccatctgtgcaaatcccattcatgaaggcttccttcttttcaacattagcaagattccagcccgccctcaattcattttaaaatcctgcctctatgaccccaataataataacaaacctttacctatagaacatttgcaaagttcccccatgtaatgacaagactttttaaaaaacaaaaaaacacaaaaacaggatctcactgtgttgcccaggctggagtgcagtggcatgatctcagctgactgcaacctctgcctcctgggctcaagcgatcctcccatgtcagtttcctgagtagctaggactacaggtgcatgccaccatgcccagttatttttttttttttttaagagacagggttttgccattttggccaagctggtcttgaactcctgggctcaagtgatcctccctccttggccaccaaaagtgctgggattacaggtgtgagccaccatgcctagccatcaatccttattttaatggattggctttagcatttgatggttctcagacaagatcaggcgcattcagggtggtatggccatagactatttgatggttctcaaattgtttcttattgttcaatattatttctccagtttgagtgtaaatgtcttaagaaatgaatttccattttatccagcactaaactttttcacagcaacagactacaaagaggtaatcagtaagtacccgcagttcctagaagatgcacctactgataatcattacagccaactaactagtgtccaattagcagtcaaaaataacagtagcaagtctctgtagccatttttaagccttgcctccaaaaaatatgccatttgtcctgtatgacagcaggtggcatatcagagacccatctttccacgtactgcagggtgacctgcctggtttagcatttagcaatcagacttttttatagcaataaaccccatgctgagtaggcaacagatgaaaaaaaaaaaaagatgccttttatggcacttcatgataatggctttattgccaaaagccgtattagcagaagatgaaagattcaatttataatctcctgaatgtctggatgttcagcctgtttctgcccaagaagagatcagtgcccgtggaagatgtatttgaaggacaatccacagtctattccgctctgccgagaaagagtccacattcttttccctttcaagccaaaaggaggcaaaaacaaccaaatgaatgagttcatgccgctctgaacttcagcgccagagtgaagcgttgagatttagggccacccgactccttgtgacgatctaaaagtcgcttagaacaattcacagcaatgtcagaaaaaacttcctgctttttgagacaacaaaaccagatggaaaactgctaaaatggctcaagtatgtggcacttttataatgtttatgtggctcttgtaaaaaagcagctttaattgacttttttgcttcccatgtcctagttctgtcaaaatctcttctggttttggggggggacttaaatgagagaacacaccattcagaatatactgttaattactataattcagaaacaatgtcctccttctctggtccttgccaaaaagccaagggagaaaggcagcagaagggaaaatttaaaataaagcacatttctaaagacggcattgaaaacaaagcaaacagtggaattgcactggcaagaaatttcactgggccgggcacggtggctcatgcctgtaatcccagcactttgtgaggccaaggcaggcagattggcttgaatccaggagttcaagaccagcctgggcaacatggtgagacctagtctctataaaaaatacaaaaaatttagccaggtatggtggctcatgcctgtggtcccagctactcaagaggctgaggtgggaagatggcttaatccagggagttcaaggctgcagtgagctgagattgtggcactgcactccagcctgggcaacagagcaagacctcatctcaaaaaaaaaaaaaaggaaaagaaagaaagaaaatttcactgggagcacccacccctttgtgtgacctacagaataccactaaatatctctgtttcatatcatcttcatataaataaggaagttaatacacttctacctcaaataccaaatatcagtgctgaaggagaacttgataccttatttacttaccttattctctacatgaagtatctcaaaaggtgttttgcaaataagtgctattcttctcatccttagaaggtataggtaatggatttaaaaaacacacaaagagataaaaactctttcactttctttatgaacaaatttgacctagggttaactttttaatcctgttcccctggaaacctgataaaggtggaatgtcggctgtgtcaccaggctgtccttagatgacagaaggaggtaaagagatgagcccatggaagactgagtaagtagtgctaagtatggctgatatggggccatgggtctggctagacctcagaaaacccccaagatggaagcttaatagaacaaaatcagtatatagatttaaattatgggtgtattttagtcatttaatcattactgttttctcttttttcaccttttttatttaaaaaaaattatttaaaagtcaccaccaccaaagtcaagaaacaaataagacaggcatggtggctcccatctataatcccagcactttgggaggccgagcggggaggatcgcttgagcccaggaatttgacaccagcctgggcaatatggtgaaaccacgtctctacaaaaaaaatacaaacattacccagtggctgtagtcccagctacccaggaggctgaggtgggagaatcacttgagcccaggaagtcgaggctgcagtgagccaagattgcaccactgcactccagcctgggcaatggagtgagactctgttaaaaaaaaaaaaaaaaaaaaaagatagaaagaagaaaaaaagaaagaaagaaagaaagagagagagagagagagaaagaaagagttaaaccagcccaccccaaaatccctccatgttccttatcccaatgtcaacccctcccactccactaaaggaatgaaagaaatgaccatcctggctttttgtaatgatcacttcctcgcttttttgagggagaagggggtgattttatccttaggtatgcaccctagacactatagtcttgccattttttaaaatgttgatgtgtattttaggtgtctcctcattttgcagaatccctccatccctttgtttttactgtaatttatctgttgaaaaccctggggcctttgactcgtagtttttcacagtatggctttgctgattgatactgttggtataattcaacatattcctctgtatttcttgcaaattggcagctggttctagaggttggatcagactcaggttcagtccctttagaaataccataggtggtggtgagttctttcattaggaaacaaataaaatccgacgatttttctttttgtgacgtgagcagctgttaatgcacaatgcctaaatccattaaaatgtgatattctaattctgccatttcttttttattcattagttagaatatttttataattaaatacactccctcttctacctctggttgctattggaccagatcacctaggaaagacaggatgaatgcttgaatctttccctttatttactaattttaagatcatggaggctcacacctgtaatcccagaactttgggaggccaaggtgggcagatcacttgagcccaggagtagaggaccagcctaagcaacatggtgaaaccccgtctctacaaaaaatactaaagttagccaggtgtggtggtacacgcacatagtcccggctactcgggaggctgaggtgggagaatcccttgagcccatgaggcgaaggctgcaatgagctgagatcgcaccactgcacttcagcctgggtgacagagtgagaccccgcctcaaaaaaaagatcatgtattggattcctgttgtcctccgaaggagagtaatccggttttattttaaaatcataataatctgtgaatttaaacatattttgatgttttgatatattataaatatttctcttattttagctcacatggtcccaaatttggcaatagagatctttttcaaattaactcctgagtccttttgacatgatcttaaattctctgctaacttcctcactatttactataataaaatgttcctgttttattttgtgcatctgctttctttctttctttctttctttctttctttctttcttttctttctttcttctttctttctttctttcattttttgtttttgtttttgctttttttttagacaggatctcactttgtcatccaggctggagtgcagtggtgttatcatagctcactgcagcctcgacccactgggctcaagacatcctcccacctcagcctcagatcttctttgcctatctgcaaaacatttgtaacttcttctagaatttcatctctttcctcctttattttccacatttttctcctttcaactattttaaagacattatctgttgttctatttgcatgtatattcctcctaatttagtctttatttctgatttttttttcttctgtttttaggggtttttctcagttccataagctttcctgctggtctaattctgacttatgttgttcttgcatgtcttatagtagctgggactatatagtcctgagtagctgggactacaaggcacatgccatcactcctggctaatcttcttttttttgttttttctgtagagatggggtctctctgtgttgcccaggctggtctcaaactcctgggctcaagggatcctcctgccccagcctcccaaagtgctgggatcacaggtgtgagccaccctgaccggccccattttggacattttctaccccagatctggaatcagccatttatccaagagctctgatttcttttagtgggaaatggtattttaaaactaaaatctgggcacgagagatgcgcattgctaggtcttttcattagtcagaacaagaaatatacatacacatacatacacataatattttttaaataaaatacctcgagttatattgataacttctcatttaaatcaaagttttttaacatctcttctgaattacatctatgtttcttttctgccatactgggaaccccagttctttaaaacacaaaagataatatagttggaatatctcataattttctgggatgcaacagtttaatggtattaatacagccacctccaaccttaagggggtgctaacctgggaagaactggtgttatcaccgacagaaagaggcaccctggatgttttgacgtggttcacgtgaaagatgccaacagcaacagctttgccacccagctttccaacctttttgttattggcaagggcagcaaaccatggatttctcttccccgaggaaagggtgtccgccattcaacccattgctaaagggagagacgagactgtggccagagcagtgggtgaaatggtctctgggtgacatgttagatctttgtacataattaaaaataacatggcatgattaattttttaaaaggctttaactgaaaacagttaaaaatgtttttgcatatgactgctcctgtctccccctatttttttaaagctgtgctaaatttacagtgtcagaacatatagccaacatacagccattacaagccatactctttcttttttcctctcatttagtccaaggtctataagtaacttattctgttgtctatctagtcttttgggttgtctgaagattttttttcttgtagattcctcaagaaaggttcatggaagcactattttctgagttcctgcagattgataatagtaatctttatacttaaaaatcagttttcctggatatgacatctttgcctctcattttatttccttgagtatcttaaacatatttctccatttttttctggcataaaatattgctgtgaaaaaaatctgaaaataatttaattgactttctcttctaagtcacttgctcatcttgctgcaataagcaaatgatttttttttctttctagttcaattatttgactagaatatgtctaagtgttgatcattttgagttatccattccaggatcgatattctcaagtacatggtgagctctttcttttttttttcattaatcattccatgttatttttaattacatgcaaagatctagcatgttacccagagaccacttcaccattgctctgttttacccactgtttcacccaccatttcacccaccaccagtctcttgtctctcccttcagcaatggtgaggcggataccctttcctcggggaagagaaatccatggtttgttgcacttgccagtaacaaaaatgttggaaagccaaggggcaaatctgttgccattggcatctttcacatgaaccacatcaaaagatccacggtgcttctttctgttggtgatcacaccaattcttcccaggttagtatctccaatcaccatacacaggttaccagtgtcaaacttgatgaaatcagtgatcttgccagtctaaacagtgtcattcaccttgacgaaggagtcaaggtagtggatggtgtgagcatcgtggaaccaggtgagggattccttttgtgcccacaaagatttttcttactttgcacaacttgtacttggcctcctccagtgtaatacaatgtacagcaaagcgaccattgatgccacagatgagacagaaattctctcccgtcttgtgaatgctgatgacatccgtgaatccagcagggtaggttatatcaatttggaccttgccatccatcttaatgaacggctgcatgcaaatctttactttgtctcctatgagggcatacttaagtctgttccttaggaaaatattaggagagacactctctcagcttgtggggactggtggttggacaaggagcaaacacactagtcaattcatccagcatccaatgctgtggagctgctacccgcttcagatgcttcctaagaccacgagccacgactgtattaggcacggaaagagcatggtgagctctttcaacatgcaattccaaatatttttcacttcaggaaacttttctgaaagtatagttttcagtgtttgttttctatccttgccttggttttcttcttcagggactcttattacgtaggtgttggatcttctttgcctatctgcaaaacatttgcaacttcttccagaatttcatctctttcctcctttatttttcacatttttctcctttcaactattttaaagacattatctgttgttctatttgcatgtatattcctcctagtttagtctttatttctgaattttttttcttctatttttaggggtttttctcagttccataacctttcctgctggtctaattctgacttatgttgttcttgcatgtcttatataattttctcagtgtcttttaccttcttttgaatgagaagattacagtgttgatttggtttgtgagcttgtctttctacatattttctctgtctgaaaaagtgttattctgctctttaatctctttttaaaaataataacttggtataggatttgacctcaattgcttgctcatttttatgtaaaattaattttcctgaaattttagaagaaggagtgcctccaggtagcttttcttatttcacagaacccccgcttcacttatgctgtctcctccaaaatttggaggtttgctttttgagatgtgctggctctgtgcccctccagctttttcatctggaccttctccttccttcatctttattggccctgctctgctcaattcaatttctattcccagcagttgcttctcagtgtgggagcctatcctgaaaggtacaatttcagagcatccatgggagtctcctccaggcccttgagaccttaccccaggcagcctgtgctcgtccatgataagagaggacaaaacccctcccgatttcagtgactgttcccagattggtctgctgcactttccagttaacacctgtttgctctttgaggatgctcctattctctagtctgtcaaataccccattagttccctctgcattcttccacatagacactgatactctaaaggtcttgtggctgttgttggtttgtctttgccatttttgttttgaggtttctgggaataccttgtaattagttttgttgtaaatgtcatccatgtgtttttggttggccactagtgctctattttgtttacaaatttgtaaaaggtagaaagctctgccaccatcttcccagaattccttatttttatttttaatttaatatgatcatgcaaacgctaataagaacaccagataacaggatggacacttagcattgtgttacaattgcttacagtattcagtgcagtaacagcctgtacagatttgtagcctaggagaatagactaaaccatatagcctaggtatgtagtaggctgtaccacctaggttagtgtaagtatgctctatgatgttcacccaatgacaaaatttatggtaccataaatttatgcatttatggtgtcaacacaagaagttggagtgaacctaaaatccccaggtattataataggtatctaaaaactgttctgacaatcttataaaaaactcaatgtgtgttttttcatgcatttaatttctagatttgcttcagtgtccctgtgagaggctcacatttatctttcctttatgccttaactccattgcctgtgtaatgaggataatatttttaatattagaaagatacaatttttattcccttgtagtcatattccaccaaataggtaaagctgtgattcagagtaccaggcaaggaatcagtcacagccaagaacagatggatccctattcagctttccatctcaaaactggctttttgggaggccacgacaagaccaatgccctgaaggctgagttttcttgaaaaagaaaggcccctcccatctccaaacccaaagttcctctataaatatttataatccaagctgggaggacttaccctagagaagactacttcttgcgacagagaagactcaacctgtgacacaagggacatttccactggataagaaagaaagaattcttggcactagggatataagagaaattcagaagggacccatcttgatccaggttcacatgaatgcacggcctgtggcaggtgttcatctatgatcacagctggcagatgtgcaggcaggttggccaccagctcagatgcatgtggctcaatcctatgggaccacccaaggagcttgatgatatgtggaaccacatcaccaccaccacagggaagaaaggggtggcgtttacccatcagcctccatgagttaagggtttccctaggggtattacctcccctacatttccaggttgcacatgtgtgagtgctgaatggggacacatgggaatcccatgtcccagcatcagaggttccaaggcaggaatcaggaggctgcagggaggtactgacaggtttcacctgtgcagtactggtcactgctgcagcaatgtctaaaagaagagttgagtacacaggcagtgcccaatataggacccagtgaagttcttataatagagaaagcaaatattttaatcagatgttctacctttcattacaatgtgattgtgacggtcaatattgagagtcaacttgattggattgaaagatgcaaagtattgttcctgggtgtgtctatgagggtgttgccaaaggagatgaacatttttgtcagtggactgggaaaggcagacacaccccctatctgggtgggcacaatctaatcagctgccagcatggccagaataaaaagcaggtggaagaacatggaaagactaaactggctgagtcttctggcctccatctttctcccatgctggatgcttcctgccctcaagcatcagactccaagtccttcagcttctagtctcttggaccatcgaccacagattgaaggctgcactgtcggcttccctactttcgaggttttgggacttggactggcttccttactcctcagttggcagatggcctattgtgggacctcattttgtgatcatgtgagtcaatactctttaataaactccccattatatacacatctatcctattagttctgtccctctagagaaccctgactaatacagtgattaatcactttctgcaagaagtgaaggtatgtacagagtctgacactagattttcattcattacacatgcaacaaagaacacataaagtcctatagactttataaatttcctttataaattatccagtctcaggtatgcctttaacagcagcgtgaaaaaggactaatacagttatcttttggtaactgcacatttaaggtgttaatttcatccttcaattgacagtctggggtcttcggcttggttgatcattgctccaagtcatcactgggcttggggtcaggaggctcatgccaggctctaaatgtcaagtacttactgggtactggacagagctctatgtccttgatgtgtttaactcatttaatgcccctatcaaccctatgaggtaggtacaattactatctccattgtccagatgaggaaattgggtaagttaaacaacattaagcagcttactcaggtcccacagctaaagtggtgtctttatttccagcacttaaaatgtttcttggccattcttgctcttaaggctgaatgacatgtctgccataacactttgtgcttctctttaatgctgtcttctttcctccctaaacttcccatggtttctaacattcccctttccacaacagaccctgactcctatctgagaaattacagccattaaacaaaaataactactgttcttgctaatttggccaaggatgtgtcccattgcctcatgcaaagcgtggtaccttccaggtccgtggaggtgctgggctggtattgggtgctcacggccactcctgagctctcaccgaatgcaaagcatggtgctctgcaccaggtgctctgggagcttgggaagaaaccataaacacatgaacacacagataataccagcccacaaatgagcatgccagcagagttcaggaagggagaaagcactgaactgaatgggagggctttctagataacatttgcacagatgggaaagagaggagacggcatttccagcagggagaccaacttcagaagaggcacagaagtgggaatgcaactgcaattgctattctgattctaggcttggtgggaaaaaaaaaatgctggcagagactgccactagtgctaggaaaaatacgcaacagtgtacgccatcaatcagcaaagtgtggccttcatgttgcttttttcttgaatatagttttttctttaactaccatgtctattcattttcagtcttctgtgactgccattaaataagacctaagagaggcattgttttggactgaaccccaacagaggccccaaccagaccaaaccaaaatggagtcacttgtgctaagtgccacatcatcaaactgaaactttaaggaagcaggataattcccaaacagaccagttttccctgaagaacgggagatttgcagcaaccaatcagaaagggcagttaactctgccctttaactctgctttaatccttacaaggaaagtaaacttaaagtaacactgtcttggccgggtgcggtggctcacgcctataatcccagcactttgggaggccaagacaggcagaacgaggtcaggagattgagaccatcctggctaacacagtgaaacctcgtctctattaaaaatacaaaatattagctgggcgtggtggcgggcgcctgtattcccagctactcaggaggctgaggcaggagaatggcatgaacccgggaggcagagcttgcagtgagctgagatcgcaccactgcactccagcctgggtgacagagcgagattccgcctcaaaaaaaaaaaaaaaaaaaagtaaccctgtctttttttttttttgaaacagaatctcgctctgtcacccaggctggagtgcaatggtgcgatctccactcactgcaacctccgcctcctgggttcaagcgattctcctgcttcagcctcccgagtaactgggactagaggctcacgccatcacatccagctaatttttttgtttttagtagagacagggtttcaccatgttagccagattggtctcaaactactgacctcaagtgatccacccagctcggcctcccaaagtgctgggattacaggtgtgagccactatgcctggcccctgtcttattttttgtattaagctgttcccttgttcctgctcaagctactttacaaaaataaattgtcctgccacacctaatgcagcacctttctatttttaaatgggatgctgcccaattcgtgaattgatagtaaaagccaattagatcattaaaatcaatttaataaagttttttattgacactgctttcccattactacaggagagctgagtgagagaccatatggcccccaaagtctacctagccttacagaaaaggcttgctggctcctggtctagaatatcaaccttccgaaagaaaagctgccaaagccaaccagttggcactatgggtgtaaaatactcacacccatttatcctaagtttacatgaaattcaagatacccaagctaattgcattctcaaaaaaaggtatcaaagaaggtaaactgtaaaaaaaacctgatactacagattcaaatgtaactgctttccatgtttcaaaagattctggagcacactctaatctggacagattctatagatagggactgagactcccaaaggagttgggattttaataagcaaattctctccttcattcatagcaataaacacaaaaatgttcaaagatcatctgtattgtatttgttaagaatatgttaaataaaagaaaatatacacaatccattaatgtgaaataacttgaaacaaaaattcagttaaagaattggttttacaaggataaagatcaccaagttaaaatgcattaattccaagatcattttaccaaaagtatcactgagcaagatgattccccatctcccaaaatgataattaaaggagaatgtggatgtccatgtatgcttagatatttataggaatgggggaaagacatggtggacacacagatcagaggcatggtaggaaaagcccagcattgaaagacacaggccttggccgggctcagtgactcatacctgtaatcccagcatttggggaggccgagacaggcagatcacctgggtcaggagtttgagactaacctggccaacatggtgaaatcccatctcttcttaaaatacaaaaattagctgggcgtggtggcgtgagcctgcaatcccagctactcaggaggctgaggcaggagaattgcttgaactgtagagactgtagtgagctgagatcacactactgcactccagcctgggcaacagatagagactccacctcaaaaaaaaaaaaaaaaaaaggaaagaaagaaagaaagaaaaagaaagacacagccttagtcataactctgctgggaatgagtcgtgtgtccaaacacaagacacttagccaccctgggactcccctgcttcaatgaaggaatcctgctagattatctctaggggctttttccattttgagattcataaaaattaacagaacgtaagagtctgtttttgagcaagggaaaattgattaatttaatgaatgtaaacaaatagaatcctttctcagctttctgatatcttgtgtttacagtatttaaatagactttgtatacttgaaagaatatgattacttcatgtaagacctaatactatctaggcttctaagaaccttaatgtgttggacgtctcagatcagaaagaaaactgtagagaacaagcaaggaataaacacagaaatcccctgagaagagtaacgcggttaagaaacagcctgtggccttgagcagctgtgtgatcacccactaacggtgctcactttaagagtgtggcacagaaatgaggggaccgcacacatcaacacccccttccagcgctcatcaacagcagtaatgaaggccgccctccagggagaattagaatgagatttgggaaatggcatcagacacataagaaaagaacaggaaacatgttcaagaacagctcaatgttgccaaaagagcaaagatcataaaatgggggtggggagtggagagggaagactgtttcctgactttctcctgacagaggaaaacattctgggggcacagatcctggggagtaacaggaacaaaaacacccggggctggtgagtgtgcgaggaaggcgatggaccccatgggtgttcagccagaaagctgggagtatgttcctacgtggccacaaagcagggccgggaatcagacccttccaggggccgtcggagagagcgatcaggctcggagatgtggataggcagccgaacgcataggagcgggtgcgggagatcacccagagagaaggtgaagggtggggcctggctgccttgagggaggagaggctgccaaagatcaccgggagaacaaacgccaggcctgggagtgacataggaggcaggactggactcaggagacggggctcagacatctaaccaaatggaagactagctaaaacagggctgtgtgcagaagcacctttccgtaagacacacccaccagcgcaccatgtcggtttatcattgtcagggcaacactcgggagttactgcccctgtccatggcaacagcccactgactcagaagttaccaccctatttctaggaatttctgcataatccacccctcaatttgcatataattaaaagtacatatagccgggtgcggtggctcacgcctgtaatcccagcactttgggaggccgaggtgggtggatcacgaggtcagaagatcgcgaccatcctggctaacacggtgaaaccccgtctctaccaaagatacaaaaaattagccgggcgtggtggcgggcgcctgtagtcccagctactcgggaggctgaggcaggagaatggcaagaacctgggaggcggagcttgcagtgagccgagatcactgccactgcagtccagcctgggcgacagagcgacagagtgagactctgtctcaaaaaaaaaaaaattaaatggaataaataggaaatagaataccacagaacacaatagaagatgtaagagaacatccaaataataagtattgcttccagaaacatgaaagataagtgtgtgtgacctggaatgcaataggaaaagagggtctcaatttcactaggaaattgaatgatgaagtgcatcaaaaagtggggaagtcgccgggcgtggtggctcacgcctgtaatcccagcactttgggaggccgaggcgggcggatcacgaggtcaggagatccagaccatcctggctaacacagtgaaactccgtctctactaaaaaatacaaaaaattagccaggggtggtggctggtgcctgtagtcccagccacgcgggaggctgaggcaggagaatggtctgaacccgggaggccgagcttgcagagagccgagatcgcaccactgcactccaacctgggcgacagaccgagactctgtctcaaaaaaaaaaaaaaaagtgaggaagtcacagacataaaggagaggctggagaggatacaggaggcagggctggggtatgggtgaaagagagtcagagagagcaacaggaacaaaggaggagaggatagggtattcttatggggtcttgctatgttgaccaggctgaatgctgctcaagcaatccttccacgtagctgagactataggcatgccaccgctggccaggatggcgcattctgataagcaatgagtccctccttttttttttttttttttttttgggagtggggacagattctctctctgtcacccaggctggaatgctggaatgcagtggaatgcacccggctaatttttgtaattatagtagagacagggttttgccatgatggctaggctgctctcgaactcccgacctcaagtgatccacctgtcttggcctcccaaagtgctaggattacaggtgcaagccacagcacctggcctcagtccctactctctttctcttcctctctcactccctctcccttacatctgctccatcacgaaggcttggccacgaggctgcaagttaggaagatacaattcagaatacaaagtagaaagtcaaacattagccccttctagttccaaggaatttgagggtgagggtatgggaaggaaaggaggggactgaaagatgaggagaaagcagggcagtcaatggcctggaggatgcaatcaaggaatgatactgggaggggcaacttcaccagaagggcgtgaggatgcatgcaggatgcaacgtccgaataagtcagcaggtgccagtgatgaccgagctaagatgcattggctgaagtaggtatgggacaggtccattggctaatgtaaataagggacaaggtcaatggaacttcaaggtcaaggtgctagacagattgtacatgtgggtcccaaagtcctccaaggtggttgcaaggctagatgtgcagagagatcatgaaccaagtcctgggtgaacaaggctctcagtggtcatctccctgataacaaaattgctgccctctgctgatacagaacgggggcaggcctccaggagtgcagaggcaggctgagggtctggggctctaactggcccttagacagcctttcacataattttcctatttttagacccaccttcaacttcagtctgcctattcctaagtcttttggggattttgtcaaataaattgggatgctttatggcttttctcccagcagcttggaatacagctttcttgtgtctgccaagtcagctacctctcactcaagtgctttctagcttccaaaatgttgtcactatttttcttctttcttgtcctttttgttctaatggatttttctttttaaaagatccttttactcttgctttggttgggtttcaggaaggaccaaaagtaaacacatgttgaatctaccatctttacccctgagctacttttatgactgtaaaaaacaatagtgctgtattcaggctgggcacgaggctcacgcctataatcccaagcactttgggaagccaaaatgggcagattgcttgcaaccaggagtttgagcttgagcaacagggtgaaacattatctccacaaaataccaaaaaattagccggacatgatagcatgctcctgtagtcctaggtacttagggggctaagaggatcacttgagctcggagaggttgaggctgcagtgagctgtgattgtgccattgtactccagcctgggcaacagagcaagaccctgtctcacacacatacacacacacacacacacaaccaataatactatattcattttcacccacaaaaatatgtgctccctttgatgtgtgaacaaggtaccccagcctcctgcctcagggcagcctgatggagttggctaagaggtgttcagtcacacaggcactttcccctgagccaagcacatcctcccagccagaccgccaccacccatgggactgtgtctctcaatgacagttaccaccccactgggaagaaactcaccaaactgttctatgagccttggggcagggtggaatcctcatccatgtaaatcaaaagttttaaaacatcccttcactgtaatgtacacatatggaacccagatacatgatttaagaaaatcgtttcgtaagaaaatataatttcttcatgattaaatacaatgccatctagttactccttcctaaagctttgattgcaaagagtagtttcagatgtttcaccattatattcagaaaccaggagtgaattaagacaggcaatcacagaattgaagggcttcagaggtagaaagagccttagctacatggtcaaacagccagctctaaccaggaaaacatgccacccaaggctttatagaaatatgtgtgttggggccatgcccagatcttggggaccgacacaccaaggacagggcccaggcatgtacacatttatgaaactgcctagatggctctgccaggtaccaggcacccccaagaaaccacgcctcctctgtcctcataatatccctccatgtacaggggcagaacactggctctgagaatttgtgcaatgcaccaggtaggcctggcagaagagacactgaaagccaggctgacacatgttctgggtatttttacaacctgctttattctttcatttgtttatttattctttcaacagcaatgtgtcaggatcttctatgtcctaatgatagcaatatttattgagtgcttacagtctgcctggcacagttaccactttacaggggttatctcatttaatcctcatattaccagaaaggggtcccaatccagacctcaagagagggttctcagatcttgcctaagaaagaattcagggcgagtccatagagtaaagtgaaagcaagtttattaagaaagtaaaggaataaagaatagctactctagagacagagcagccccgagggcttctggttgcccatttttatggttatttcttgattatatgctaaataaagggtggattattcatgccttccctttttagaccatatagggtaacttcctgacgttgccatggcatttctaaactgacatggcgctggaggtagtgcagcagtgaagacgaccagacgtcactctcatcaccatcttggttttggctggcttctttactgtaacctgttttatcagcaaggtctttaagacctgtattttgtgccaacctcctatctcatcctgtgacttagaatgccttaactgtctgggaatgcaccctggtaggtctcagcctcattttactcagccgctattcaagatggagttgctctggttcaaatgcccctgacactcgcaacagtattatgaggtaggtacttttaatatccccactttacagttgaagaagaaagcacagagatgttaggcagtatgctaaggatgtgtaaccacccagcgggttcatcttgcctgctgcccagatagagctgatttatcaaacaggggaattgctatagagaaacaatttaattcatgcagcgctggctgaatgggagtcccgagttttattattactcaaaccagcctacctgaaaattcagagggtagggtttttcaactttggcaggcaagggaaagggcactgctgattggctggggatgtaattagaggggtgtggaaaatgtgtactgagtctgcttctgggtggggccacaggactggttggctggtccaggtcagaagggcaaaaatctcaaaaagccagtcttaggttctacaacagggatgttatctgcaggagtaattgggaaagttgctatcttgtgacctctggaataatggctggtcatcgtttatgcctacacctcagctgatctcggattcctctcatcctcctaacctggtgggctttacagaggtagtttagttttggggaagggctattgctattaaactataaactaaatttctcccaaagttcgcttgacccaagcccaggaattgcctaagggcagtttggaggctgaaggcaagataggggttggttagatcagatctctttcactgtcataattttctcactgttatcatttttgcaaaggcagtttcaaacacacagctagtaaatggtggtgctcaaagacagctccagaacctgggctccctcctaactgctaggatcaactgcctctcaggtgctctgtttccaggtatcacatttgttatcaggtgctctgtttccaggtatcacatttgttaagaggcgtagagagaaggagagatgggtgagcagtattacaacccaaccttcagtagggcagaggtggtcacccaggagccatcagaagatagaggggtgttcttgccccagaggttgggccagtgagctgagtcttgaatgacaggaagtaggaggggatgagggtgagggaggagtccgggcagcagaaatcacagaagaataccattgggaataccacagtagtgtaacagatccaaatttcagtgcctacactcaggtagcaagacgtaccatttcctcttttctttgagaccttaatgtctattaggatcccccattcctttgggtgtcagaaatagtttaattcagaggcagggtccacctttgccctcaaaccatgtcttcaactgggggctccatggagccatggtacaaatctatccttactcatcatctagccacaatgttcctactgaggctgcccacacggggtccttgaccaagaggtctgtggtttttcccgtcagaataccttcttgccttagtgaactctagccctcctgtccttctctagcaagagtcctcactctctcttccttcactgatacgcttctccaaagattctcatcaccaggtctccatgtcttcacctctcagccttcattcactactcaatacatggtcagaaggattctgttcccacaacccatccacattgttccgctaagatcacctatgggcaccatgttgctaaatccagcagtagctcttctcttcgtcttggctgacttctcactctcattccatgatagcacagtctcctgcattccctgctactactttaaccacacctgagcataaccttgatttttctcgtattgtcttgattttacctccagcctcccccaggaccaaatgtttaatccatcaacacgttctatcaattctattgtcaacaaatataggtcaagtccatggacttctcttcggtgccattgttaataccctgacataagctcctcttctctctcacctggattcatgaaacagcctctttacttggtctctctgcttctacgaaatgcagtccccacaaagcagtcacagtgatcttcacacacacacacacacacacacacacacacacacacatctgattatggccaggtgcggtggggtatgcctgtaatcccagcactttgggaggccaaggcaggtggataacttgagcccaggagttcaagaccaggctgggcaacatggtgaaaccctatctccacaaaaaaacacaaaaatgagccaggcatggtggcacgcacctgtagtcccagctactcggaaggctgaggagggaggattgcttgagcccaggaggtcaaggctacagtgagccatgattgcaccactgcactccagcctgagtgacagagcaagactctgtctttaaaaaaaaaaaaaaagaaagaaagaaggaaaaaaaagagtcagtataatgtttcatcacacttgaatactttactgtacggttcctaaaaaaaagcttattctcatataaaaccacaggacaaatatcaaagacagaaaattaacactgatatattattcccattaaatccttagacctcattcaagctttgtccaataatatcccttgtaacaaataacttcagaattacctgttgtaccaggttgtcatgtctccttagcctcctgcaacttggattggttccttagtcttcctttgacatccatgaagattacaggcaaagccaaggagggaggatcccttgagcccaggaattcaaaatcggcctgggcaacatagcaagacctcgtctctaccagtaataacaaaaaattaggttgggtaccgtggctcacgcctataatcccaacactttgggaggccgaggtgggtggatcacctgaggtcaggagttcgggaccagcctggccaacatggtgaaacccagtctctactaaaaatacaaaaaattagctgggcatgttggtgcacgcccgtaatcccagctactcaggaggctgaggcaggaagatctctttaacccgggaggcggaggttgcagtgagctgagattgtgccattgcactccagcctgggtgacagagcaagactctgtctcaaaaaaaaaaaaaaaaaattagctgggtgtggtggcatgcaccttcggtcccagttactcaggaggctgagatgggagaatcactggagcccaggcagttgaggctgcagtgagctgagattgcacccctgcactccagcctagacaacagagcaagaccccatctcaaaaaaaaaaaaaagattacaggcaagttaaactgtaggctgtccatcaatttgggtttggctttttagattcaggtaatgcatccttggcatacagttatttcattgcatcttattaagtaatacataatttcagttttcattgcatcttattaagtaatacataatttcggtttgcccgtttgttgatgatgttcagtttggtcacttgattaagggatggggtggggggaggtcttctggacttctgtactgtaaagagactttttctctttataattattgagtattttcataattcattcattcatttgtgaatgaatgaataattcataagtgaataaattcattcattcattcacttattcatttaaccaacgtgatccatggatttctatctttttcagtccattattctcattaatctgatgcttcaattgtcccagtttgggccgatggaaaccatttcaagatggcttctgtgtctttttatttgtctccatccttcttggatcccacacttaccttctggaatatgatgttctaggttcctcaggttcctcttgtactctcctagcccagtcatacttctttttaaacaagatgtttttgaagagacaggggtctgctctgttgcccaggttgaagtgcagtggcacaatcacagctcacggcagcctcgcactcctggactcaagcgatcctcccacctcagcctcccgagtagccaggactacaggcatgcaccactacctggctaattttttaaaaaaaatatgtagctatgttgcacaggctgctcttgaactcctggcctcaagcaatcctttccccttggcctcccaaaatgtggggattacaggtggaagccaccatgcccatgcccagcccccagccatccttctgccactcatattttgacacaccatgccaggtagcacttccacccccatattcactctgtccaggatctaacacccccaccccgcataccaggccacccaccatggtagaactccaacaccccatgccaggcagcgctcctaggtggatgcctgcctcaccttgcttgaatttttttttttttttgaggtagattctcactctgtcacccaggctggaatgcagtggcacaatcttggctcactgcaacctctgcctcccaggctcaagtgattctcccacttcagcctcccgagtagctaggactccaggtgcccgccaccactcccagctaatttttgtatttttagtacagacagggtttcaccatgttggccaggctggtcacgaactcctgacctcaagtgatccacccgcctcagcctcccaaagtgctgggattacaggcgtgagccacagagcctgacctcttgcttgaattctgatacccgctgcatggatgctctcacctgggagatgtctgatgcctcacatagggctgccctcttatgcggagcacttctttaccccactcatgatcagacaccccacactgggctgtcatcctacacaaatgctttccacactccaatgctccgatgctccaagctgggccggccttcagcagggaggccttcttatccgactcaggttccaatgctctgcatcagccaccaaacctcaccctggctatctctgacagcccaggctaggccatccccacccctcccatgtggataccctcctcacctgcttcaggatggtagggcttccctgctgctctgtatggatgtccaccttgcttggtcccacctaatgacttttaaaaggatttgttcaggaagagaaagaaacggaagaagtgggaaagagaaagaaataagcaaggcttttattttagaatcaaggggtgcacgtgcaggtttgttacaagtcttccatgatgctacagtttgaggtatgaatggtcccgtcatccatgtagtaagtagggtacccaataggtagtttctcagcccttgcctcaccacctctctcccctctctattagtttgcattgtctatttttcccatctttatgtccatgtgtaccaaatgcttagctcccacttataagtgagaacaggcagtatttggttttctctttctttgtcagttggcttaggataatgtcctccagctgcctccatgttgctgcaaagggcatgatatcatcattttttttatgctgcatggtattccatggtgtatatgtaccacattttctttttgtttgtttgttttttgttttttgttttgagacggagtctccctctgtcgtgcaggctggagtgcggtggcatgatcccagctcactgcaagctccgcctcccgggttcacaccattctcccgcctcagcctcccaagtagctggggctacaggcgcccatcactaagcccggctaattttttttttttttttttttttgtatttttagtagagacagggtttcaccgtgttagccaggatggtctcgatctcctgacctcgtgatccacccgactcggcctcccaaagtgctgggattacaggcgtgagccacctcattttctttatccagcccaccactgatgggcacctggaaaagcccattctcttgtaaacccattctaatcagacttttgtcccatccttccacagaaactgctcccaacaagttaaccatgacctccacaatggttgattctcacagctcactcaacagagctcttcctccttctgggtatgcctggttcacttgggtttgaggatacacattctcctggtttccttcctgcctcgtggaaatgccaaagtagagaagccacctgcccgtgaacctaagacactaaaatcctgaagtgtgtggactgcattcctgaattaaaggctaccaaaaatgtcactgtcatgacatacccaccccagatatatacaaagcagttagacgggaacaaaattaaggggataattattcattacaaaactactaccttcaccagaggccaaggttaaaataataatctaaacactaatcttgttcttagttttaattaattttctttaagatgctcatcaccattgagaaacctgcacaaatgaatgctaattcatttcactgaagtgaaagagaaaggggcttttttgttttaaatgcttttctgatttttttttaaattaacactgctaacctatttcatgtttaaaatcttctctgccgaggctcaagttaggtttcccaatggaagaagaatacagctcctgggaattagggcaaaatggcttgttaaatgaatgaagacagaggctgaaatacaaatattttgtgaagtgttcatattttatcagccaaaatgagctatagcaaatcatcacatgtctaaaaaatgtagagaatactgggagctgctcgttttacatcgagtcgaccttctgttgctttaatgacctgatctgaaataacctggcaggctcagcatcacccccaaggtccgtgtcagcaaagggacccactgtgtccatcactgacatgacgcacgcgcctggctgccactcaccagcagggggcactgcgccggggcctttctgtaggcaaaaccactcaaaagctaaggattgagaaacatgtattccgggagacagaaaaatgtgcgtcagtgtcaccatctcagacaaactcattgccacaccatcgacaggacatcttcatgtgtgtcttcataacaatatccactgtagggtgttctgaggcccagagcctatcccagaattacaaataaaatagtagtgaagccaaaaataccaagtctatctgaaaccctttcagtgagcatgatttttattttattttatattttgagatagggtctctctcggtcactcagccgggagtgcagtgacacaatgataactcactgcagacttgaattcccgggactcaagtggtcctcccacctcagcctcctcagtagctaggactatggcatgcaccaccatgctcagctgaatttttttttattttttgtagagacaggttctcactttgttgcctatgctggtctggaactcctggcctcaagcaatcctcccacctcggcctcccaaagtgctgggattacaggtatgagtcaccgctcctggtcaacatctacattttatatttggggaaagtggggcccataaattatgtattttgtgatatatgagagacaaaataagagttttaattgcatttaatatttaaaagactgtaatggctgacccataaaacaggattttatccatgatttcctctctagtgaatcattcctatcagcacaaatttttcccatgttaaaaaaaaaataagttttggctaggtgcagtggctcatgcctgtaatcccagcagtttgggaggccaaggtaggaggatcacctgaggccaagacttgaagacttatctgagcaacataatgagactgctgtctctaccaaaaaaaaaaaaaaaattaaaaattagctggacatggtggcatgcacctgtagtcccagctactcgggaggctaaagggggaggaccccttgagcccaggagtttgaggctgcaatgagtggtgattgcaccacatcactccactccactccactccctgtctccaaaaaaagaaaaaaaaaaaaaaaaagttttggcctttctttcccttctcattactgcccccatttctctctttccctttatagggaagttgtgtggtaaacacactctacgatgagtattcacatccttgaataaactcctccccttgaaggaggacatagtttgcttgagtgtgagcaaagctgtgacttgcttctaaccaactgtatacagcaaaatcaataggatgtcactcccaagattacatactattaagactccatcttgctatcaaactcactctaacactctctctcaagatagttctgaagaaataagcagccaggataggaggccaatctatcaagaagctaaagacaacctctaagagctgaaagccaccaagaagccaggactctaagtcccacaaccacaaggaaatgagttctatcaccaacctgagtgagcttgaaagcaccttcttccccagttgagcctccagattagaacacagtcaagctaatcccttgatggcagccctgtgagaccctaagaagaggacccagttaatctgtgcccagactcttgtgagataataaatgcatgttttcttttaagtcactaagtttgtggtaattttttatgcagctgtgttcaaggatttcccaacaccactctcagcttcaatgatcactagaaggactcgcagaattcagcagagccattacactcacagttacagtttatcacagtgagcagatacagattaaaatcatcaatgaaaaaagatgcatagggaagaatcaggagagaccaggcatcagtttccagttgttctctcaccatggagtcatgtagacagcacttaattctcccagcaatgatgaatgacagctcccacagagtattaccaaacagggaaactcactgaagcctttctgtccagggcttttattgaaggttggttacctaggcatggctgactgcctgcatggctgactcgagtctccagcacctccagagattgagatcatactgggtagtacaaggcccccgccatcaatcacattgttaacatgaactatcttacatggcccaaggcctcagataaacaaagacattgttaacagacaggagattccaggagattagaggttgtctcccagtagccaggaaaggaccaaacctttctttggaatgtggaagaatcagactacctaaacctgctgaatcctttatagcacagcagaaatagataactaataaagattctggtacctagaagtagggtgctgctgtagaagtggctttggaataaggtaatgggtggaggctggaagaattgtgatgagcatcatagaaaaagtataaattgctttaaacaagccattaatagaaatctggacttggagaatggtaccggtgatagctcagaaggaagtgaggaccatgttattagaaaatgaaggaaggaaaggctgggtgcagtggctcatgactgtaatcccagtactttgggaggccaaggtgagtggatcacttgaggtcagaagttcgagaccagcctgggcaaaatgatgaaaccccatctctaccaagaagaagaagaagaagaagaagaagaagaagaagaagaagaagaaggagaaggagaaggagaaggagaaggagaaggagaaggagaggaggaggaggaggaggaggaggaggaggaagaggaagaggaagaggaagaagaagaagaagaagaagaggaaagaaaaaatacaaaaattagctaggcatggtggcgggcatctataatcccagctactcaggaggctgagccaaaagaatcatatgaacctgggaggtggaggttgcagtgagccaaaatcatgccactgcactccagcctgagtgatggagtgaaactctgtcaggaaagaaaaagacagaagaaagaaaaagaaagaaagaaggagaaagaaaagaaaaagagagaaagaaagaaaaagaaagaaagaaagaaagaaagaaagaaagaaagaaagaggaagagagggagagagggaaggagggaggaaggaaggaagaaagaaaaaggaaaggaagggaaggaaagaaggaaggaagagagagagagaagaaggaaggaacagggacagtaaataaggtagaaatcaggagacattcatgggactggggccaatcagacatcaacatggtggattagcatccaagatggagtaatgtttgtctccacaggaagagacgtgaatcactggggattagactgtggtggacagactgtaagatcatcctttataatcctcaaattctagtattaatgcacttttagaatccccttcccttgagtatgggcaggatccataactcgccttaaccaatagaacaggacaaaggtgatgtgacatcattcccagtagcatgttacattatgctatggtaccatgttacgttaaataagattccatcttgctagcagactcacccttggaactctctcccttgctagccatgaggactatgttagagaatcgttaagtttcaagaaactgcaggtgtcttctactggctgaggatgcctcacagtgtccagatgtttagtcaaactttgttctggttgtttctatgaaggtgttttgtgtgagattaacatttaaatcagtggactttgagcaaagcagattgccctccataatgtgagtgggcctcatccaatcagtagaaggcctaaatagaacaaaaatactgacctcccccaagcaagaaggaattctgcagcagatgccttgacttgaattgcagtgttagctccctctagggcaggggtgtccaatcttttggtttccctgggacacattgaaagaacaattgtcttgggccacatataaaatacacggatgctaatgacaactgatgagacaaaaataaatatcacaaaaaaactcataatgttttaagaaagtttatgaatttgtgttgggcctcattcgaagccatcctgggtcacatgccccatgggctgtggattggacaagcttgctctagggtcactgtcctgatgatctttggatctgaactacagcactaactcttctctgggtctccatgctactggcccaccctgcaatttttggacttgtcagcctctgtaatcatgtgagctaattccttaaaataaatttctctctctctctctctctctttctatatatatatatatatatatatatatatatatatatatatatacacacacacacacacacatatacaaatatatacatatacatacacacacatgtacacacacacatatatatacacatacacacacacacgcatcctattgattctgtttctctggagaacctgagtagtagagtaagggaacaatgaattgaatgattgtgaatttcccatcaggtaccatagaggccagagggcagtggaaaaacatttctaaactgctgaaaaaggccagggatagtggctcacgcctgtaatcccagcactttgggaggccgaggtgggcggatcacttgaggccagtagtttgagactggcctgggcaacatggcaaaaccccatctctactaaaaatacataaattagccgggcatggtggtgcatgcctgtaatcccagctactcaggaggctgaggcacaagaattgcttgaactcaggaggtagaggttgcagtgagctgagatcgtgccattgcactccagcctgggcaacagagtgagactctgtctcaaaaaaaaaaagtgctgaaagaaaagaactgttaacatagaatttcatatccaaataaaatgcccttcactaatgaaggtacaataaaaacattctcggccgggcgcggtgactcaaagcctgtaatcccagcactttgggaggccgaggcgggtggatcacgaggtcaggagatcgagaccatcctggctaacacggtgaaaccccgtctctactaaaaatacaaaaaattagccgggcgcggtggcgggcgcctgtagtcccagctactcgtaaggctgaggcaggagaatggtgtgaacccgggaggcggagcttgcagtgagccgagatagcgccactgcactcaggcctgggcaaaagagcgagactccgtctcaaaaaaaaaaaaaaaaaattctcagatgaaggaaaatgaagagaatttgtcaccagcaaacctgctccaaagaaatgctgaaataaattctggcagaagggaaatcaaaccagtgtgtaacttggagcttgaggaatgaggaagagcaacataaatggaaaatatctggataaatatagtaggttatttttctccctttaagtttcaaaaaaatatgtgtggtggctagaagcaaaaattataacataatctggtggggttttaaaattgtatgtagatacaatgcacacggcaactacaacataaatgagggcaaggggtcctatctgggaataaggtttctctgtcctccacactgaattggtagaaggtgttatcagtgaaaacggcagagtgagaacatccaaagagcctctcctctatagaagcagtgagaacatgggtgaaattttttttttagacggagtctcggtctgtcacccaggctggaatgcagtggcgcgatctcggctcactgcaagctccgcctcccgggttcacgccattctcctgcctctgcctcacgagtagctgggactacaggcgcccgccaccacgcccggctttttttttttttttggatttttagtagacacggggtttcaccgtggtctcgatctcctgaccttgtgatccgcccgcctcggcctcccaaagtgctgtgatcacaggcatgagccaccgcgcccggcccatgggtgaaattttttagaatctactttttcaggactgtggagacttgctgagcatttattttagaaaaatggctgaatctcagagagaacagtgagttttgtggtgatttaatttgccctattctcatccccctgccctcactccatggtaaccttgaaaaccagcagattgctatcatggtgaaaaccagcacactggcagtcactggagggggcaaatggaattggagctccttcaaagtccccttctcagagaattttcattatttgacctatctctggctccttaaaagactccagtcataggctatctttatttgacttgactcagatcccagggcaaatagtcctcttgctatgtcaccaggctggtctcgaactcccaggctcaagtgattctcctgcctcagcttcccaaagtgctggaattacaggcatgagccaccatgcctggccagaatttgcatcttgaactggtttagatagggatcaaatgcctttgctatctattgagatgatcaaatggttttgctcctttagtgtgtctatatgatgaagtacactgattggttttcgaatggtaaactaacttcgtactcctggcgtaaattctacttgatcagatgcattggactaaaggctgttttttccctcgtgcttcttgtactccattaagcctcatttcttctatttctgattcgctttttccacccacataattgggacacgtcaaaattaagtgagttatgcaaagtacagtaaacatgataaagtattttggggattaaacttatgcttttacaaaaagaaataatttaggtaaataatacaaggattatatgttatcatactttataagatactgatgatttcttaaagatatttgagaactacaccctttactgccacagccaaataagtggcacttgtcaagtaaactgagatatttgaagcagactctgactacagcaccccacaaaatacaaaactatgacccacattcactctaaagctatttctgggccagacgtggtggctcacccctataatcccagcactttgggaggccaaggtgggtggatcatttgaggtcagaagttcaagaccagcctggccaacatggtgaaacccgtctccactaaaaatacaaaaattagccaggcatggtggcgtgcgcctgtaatctcagctatttgggaggctgagggaggagaatagcttgaatccaggaggcagaggttgcagtgagctgagatcatgccactgcactccagcctgggtgactccaggaaggaaggaaagaaggaagggagggagggagggagggaaggggggaaggagggaaagaaagaaataaagcaacaaagcaagaaaagaaaagaaagaaagaaaaaagaaagaaagaaagaggatggaaggaaggagacggagggaggagaagggaagggaggggaagaagggaggggaacggaaaggggaaagaaagggaagggaaggggaagagaggaaggagctacttctgaactcaagcccagaacaaaatctgtgtaccaggtgattctagatcatgatgctactaaaagtatcactgttaattaataaaacaaaactaaaataaaataaagttataaatgtgtaagagggaaaagggtggaaacatgaagaaagaagcaggttgcttgttttaaatatgaatatgcagcaccaaatcaggatttttagtagtaaaacactgcaacatgatcaccccgaaacaaaacacacatgaaaattaatgtgccttatcagattctgaaagtcctatttgcttaccattttcctcataagaaagctgagaactcactgctcactgatgtgactttctgctctgcgcacacctaaggcatgaacaagagccaagaatctattcctttcgaataagaggagtctcgttcctatagaacatgggtcttgaaagggctctttgaagccctaaccaaaaagtacacaaagatggaaagagtctaggctggggaataggcaaaaataagaaacaagtaaaatgaaagtgatgacggcacagttttgtaatctcctccaatcccctcataaaacagggagatcaattaggatagcaaaagataaaacccacagagaatgccatcaaccaaatgcatgcagtcaaccagcatatgaaaagaagctcaacatcactgatcactagagaaatgcaaatcaaaatcacaatgagataccatctcacaccagtcagaatggctgttaccaaaaggtcaaaaaataacaggtgctggtgaggttgtagcgaaaagggaacacttatacgctgttggtgggagtgtaaattagttcaaccattgtagaaagcagtgggacaattcctcaaagacgtaaaaacagaactaccattcaacccagcaatcccattgctgggtatacacccaaatgaatataaatcattctaccttaaagacacatgcatgtgtacattcactgaagcactagttacaatagcacaggcatggaatcaatgtaggtgaccatcaacaacagactggataaagaaaatgtggtacatatacaccatggaatactatgcagccatcaaaaagaacgagggccaggtgtggtggctcatgcctgtaatcccagcattttgggagtccaaggtgggcagattacttcaggtcaggaatttgagactagcctgcccaacatggcaaaaccccatctttactgaaaatacaaaaattagctgaacgtggtggcacatgcctgtagtcccagctacttgggaggctgaggcaggagactggcttgaaaccaggaggcggaagttgcagtgagccaatatcgcaccactgcactccagccttggtgacagagtgagatcctgactcaaaaaacaacaacaaaaatgagatcaggtcctttgtgggaaaatggctggaactggaggccattagccttggcaaactaatgcaggaacagaaaatcaaataatgtatgttctcactaataagtggaatgagaacacatggacagatagaggggaacaacacacactggggggcctgcttgagggtggagggtggaaggagggagaggaccagaaaaaataactgttgggtgctagtatctgggtcacaaaataatctgtacaacaaacccccatgacacaagtttacctatataacacacctgcacatgtacccctgaacttagaagttttaaaaaacacacatatataaaactataatcacacacacacacacacacacacacacaaaccacagacagcagtcagacccacagggaatgacatcaggccaggggcagagggaaatgagggtcttaagtgctggggagctaagactgccaacaggtggtcagccccacaggaggggctcccacccagacgcagatctaggcacagcaggcaaaactgggcagggctttgctgcaaaaaggcagttgaccatcaagatgctcaggaagcaggtgcagtggcccacacctgtaatcccagcactttgggaagctgcggtaggaggattgcttgaggccaggtgttcgagaccagcctgggcaacatagtgaaacacctatctgcaaaaaaatttcaaaaaatcagcttattctggcctgtagtcccagctactcagaaggctgaggcaggaggatcacttgagcccaggagttcgaggtttcagcaagcttgacggcaccactgcactccagcctgggcaacagagtgagaccctgtctcaaaaaaaaaagactctcagaagcacccagtggcctccctccccttctggagttggagagctcacactgaggagaaatcgttgcaaggagaccccaacttgatcagggctgggcacctgggcataaaaaaaaaaatttagatgctagtcagagaggggaccagagaaagcaaatagcagaaagcactgaagagatgactgcacatattttctaagactttctgataaaatgggaaatgagagaaagacactctggcccatcctcaatatagaaatttccttctaaaaatacaacttcaacaacagaaaaagattatggtcaatcctcactcaaaaatagaataaagaaagaaaaataatccaaataacatatatttagaggataatattcaccagaaaaaaataaaactacggggtatatgaaaacattaagctaatatttcaaaatgaattacagaaaattaagaaaataggagaagctatgaaagaaaggcataaacacaaactagaaaactcagaaatgagatggccagacaataggcagatgtgagaacagtttacagagctcagaaacaattggcagaaacaagaaaaaaaggaagaaaataaaacagaaatgaagaaaaggatagaaagcattaaaataaaaatgataaaagtaaaaaataagaggccaggcataggggctcccacccatagtcccagcacttcgggaggccgaggcaggaggattgcttgagcccaggagttccagaacagcctgagacacgtagcaataccccgtctctacaaaacttaaacaaaattagccaggtgtggtggctcatgcctgcggtctcagctactcggggaggctgaggcaggagaatcacttgagccagggaattcaaggctgcagtgagccgtgttcacaccactgcattccagcctgggtcccagagaaagatcctgtctcaagagaaaaataaaaaaatgtaaacaaaagacagccaatgtatgtacagaaaaaattagagccttcatctttgccaatcaacatcctggcacattggtttgttgtttccaactttttattcccaacagccattctgaatggttttttggtttttggtttttggtttttgtttgttggagacagagtcttgctctgtcacccaggctggagtgcaatggcatgatctcagctcactgcaacctccgcctcctgggttcaagtgattctcctgcctcagcctcccgagtacctgggattacaggtgtgtgccaccatgcctggctaatttttatatttttggtagagacagggttttgccatgctggccaggctgctctccaactcctgacctcaggtgatccacccacctcggcctcccaaagtgctgggattataggtgtgagccaccgcaccggccctgaatggtttttgaatgatctcacacagagtatatgatttggacactagtgcagtagagtcttacaatgaaacagagtatagggttaccaaaggaaagaaggcagaagatggaatttgaggtaatcagcatgagagaaagacatatctgcaactaacctgagtacagctgaaatcatccctttcctatggagtgccttagtctatgtcttaactgcaaattgtaggagatgatcatttcaagaaggcaaaggtttgtcatctgtgtttttaatcccaagatggtgcctaccatcagtgatgacctgctgcggtatcctcattccagtaatcactccctcagcagtgcgattgtgatgaccgaaaggaagcctctgctattgtttctaccaccagctttatcaaaaccaagacatggaccaggggcagtggctcacacctgtaatcccagctactcaggaggctgaggcacaagaatcgcctgaatccagggggtggagcttgcagtgagccgagattgtgccagtgcactccagtctgggtgacagagtcagactctgtctcaaaaatgaaaaaaaagtaagtcatggtcttcataatctacagagactcctcacttgcgtatgttgcagggaacactccttgcagatcagaaaaactagactgacatagctcatttttggaaactgcccttgagaatgtcatcgaggccaggagtggtggctcacacctgtaattccagcactttgggaggccaaggagggtggatcacctgaggtcaggagtttgagaccagcctggccaacatgtgaaaccccatctctactaaaaatacaaaatttagcagggcgtagtggcgcatacctacagtcccagctactcaggaggctgaggcaggagaattgcttggacccaggaggcagaggctgcagtgagctgagactgtgcactccagcctgggtaacagagtgagactccgcctcaaaaaaaaaaagtcatcgaagtgaattttaactaggcacgatgattgttttcatggttacccttggactaaattttaggagctggaatgagtgagacgtgattgaacagagaggccaggatggtggcattaaaaggggttcatctcagttcttcataagtaggaagtacatatatttataattttcacttatcacagggtaaatttaaaattgattcattaaaagatgatctttttcaagaattcaaaggacatagaattttgtaacatgcaatattttttaattacttgtctttttttctttctaattctaccccccaagtctatttttttataaggtcattgatacataaatagtttcagggaggatgatatattatctacagactttctatgtagtgaacctgcctacatataaatgtcaattcatccaactactgtgttggaataatttctgtggattgaacctgctagggcaaagtaaatgcaaaatctgcattttgaggctgggcgcagtggctcatgcctgcaatcccagcactttgggagtctgaggcgggcagatcacctgaggtgaggcgggcagatcacctgaggtcaggagttcaagaccagcctggccaacatgatgaaacccccgtctctactaaaaatacaaaaattatccaggcatagtggcaggtgcctgtggtcccagctactcgggaggctgaggcaggaaaatcaatggaaccctggaggcggaggttgcagtgagccgatatcacaccactgcactccagcctgggtgacagagggagactctgtctcaaaaaaaaaaaaaaatttcctataacataactcgagtgagaattctccatttcctaaaactgtacaaacatcagatatcagtatttgtaatcactgataatgtaatattacaaagaaatttatttttcttctattaatgttaagctacatcatcctggtgtagatttattagtcatttgcgttatttcattttcctctgttccttttattttcactttccttgtaatattagtctctttgttactgatttctaagagttcattcatgtttaatgatgttaacattttgtcaaacattgcaaatgagataccttgttttttcctgtttattttaccgtggtggttaattttttggttgtacagaaattatgtattgaaatataatcaagtgcggttttaaaaagaaaaaaaaggcaagaaaaggaacagaaaaaatctttttgtttttttgagacaggattttgctctgttgctcaaactggagtgcagtgcaatcaaggctcattgtagcctcaaactcctgggctcaaacaatcatctcatctcagcctcccaggtagctgggaccataggcacatgccatcaggcccagctaatttttgtgtttttcatagaaatgggatttcaccatgttacccagtctggtctcgaattcctgggctcaagtaatctgtccaccgtagcttcccaaattgctgggattacaggcgtaagccaccactcctggcctgaaaatactttaaaaaaaaaaccgtaattcaaaaatctcccctgaaattaaaaataagaaaaaaaagacttgaatcttcatacttacagggcacactacattcctgggaaaatcagttcagcatggccaactttgagacatattttagtaaaatgatggaactttaaagaaaaaatcctttggacattcgggcaaaaagacaaagtgactttttaagaagaaggaaatccgcttggcatcaaacttttcaacagcaaccctcaaagccagaagacacgggagtagcctatttaagatcctcaaggaaagaaaatgtccactgaagatcttatcctgaataactctcatataaattcatggactaactctatgagcacacaagacaccagataagctcttccttcttcctctttccccatgccttcctgagagaattcagtcctaactcagccatcaggtatgggagagcaaggtagttgcctgcacagggggagggcaggagcagcggtgagggccaaaaatgaggtgggatagctcaagtagggtgaggaagacgtttgcagaggagggcagcctagcagaggcttagcaggaagagaaaggcatctacaaaaggtggcaacctggcatgggtgcgagcaaaaaggagtgaaaaaagtgtccacacccagggcagcctgacccaggaagtcagagcttgaatagaaatagaaagacagtctggttgggatgtgaaaacccacacaaaagaaggaggcatcagtgtgtgtgaagggaagagtagggcatcagaggccaagtaggctgagagtgtgcagcagacaacctggcccagggagtagacgcccaactggggtgagaagggcagccacgaagggtgcatcctggcaccgagagtgatattccacgcagagtgagaggggcatctatgcaaggcatgaaggtggcagtaaagatgggagatttgttacatacagggaggttgtgcaagtaagtaaatacattaaagataatagggactgggtttctcactgtcagagaaaagggatacaaacatggaaaaggagaaaactacagtgaactctgtggtattgaactggaattggaggtatagtgtgactcatagagagaaaaaagagtagagtagattggattggattagattgaattggattgactagattgatagatggatagatggaggggagataatggatggatggatggatcaagcaatcaatggaatcaatgaatcaatcaatcgagtgatggatggataaatggatgggtggatggataagaagaaggaaggaagaaaggaaagaagaaagggtagatggatgggtgatagatggatggatggatggatggatgggtggtggatgaatgggtggatgatgaatgaaaaaatggatggatggatgcatggatgcatgggtaaatgggtagatgaatagatggatggatgatgaatgaaaggatgggtggatggacggatgatgaaaggttgcatggatggatggatgggtagatggatggatagatgggagatggaatgatggatggatgaattgatggatggatggatgatggatggatgagtggatgggtgggtagatggatggatggatgaatgatggatggatggatagaaggatggatggatggatagaaggatggatgggtggatggatgggtagatggatggatgatggatgaaaggatggatggatggatgggtaggtatatggataaatggatgatggatggaaggatggatggatggaaggatggatagatgataaaaaacgcaaatgtgtaaatgtgtggtatatgacatacatatatatcccttagcctgtttacagagtgtgcctgggaacaactacctgacagtattgatgagcacacctagaatccttagatcttagtttctaagtatcatttcacatgagaagaaatcagggctccttgactgagtccaggaaaatgattcagtccaggcctaggacaggtgcaagatatgcctagaatatcttgttgttcagaaagtaaggaaattctcaatgaatgatgggaacatgtcaaaatgacacaagaatgagctcaaagaggatcccactggcctaaatctgagacagttcgaatatcaaaataaataaataataataatggagtataattgatccaataaaataaaatccttaagtccgatataaatacatgaatgaataaattgagtttgatcagcaacagggtatttacaaagtttttgtatgtttgtttgtttgtgtgtttgtttttgagacgaattctcactctgtcacccaggctggagcacagtgccatgatctcagctcaccgcaacctctgcctcccaggttcaagtgattctcctgcctcagcctcccatgtagctgggattacaggcatgcgccaccatgcccaactaattttgtatttttaatagagatggggtttctccatgttggtctggtctcgaagtctgacctcaggtgatccacccgccttgccctcccaaagtgctgggtgtgagccaccgcgcccagccctttacactgtttaaagtacctccacatggttggatggatgatggaaggatgcacggatggatggatgggtggatggatggatagataggggatgctaattaagaggcaaagagtaactttacagcagaaaagtctggcaaatgccactttattaagtgatcacagcgaacaggacaaattaaaattgtgtgacagatacatggagaatgcaacatccacctttgcaatatccctccccaaaatgcacaacctgagtctaatcataagatgtcatcagatgaacccaacttgaaggacattctacaaattaactggtccctaatcttcaaaagtgtcgaagtcatcaaagtgaaggaatcatcctgtccctttggctcctccggtctggaggaggaggagtcagtctgggggaggtatcttccaaactggaagagctaaagggacatgaccactaatgtctcttagcaatgcatgatcctggctgaatccttttgctataacagacattatgaaaacaataggtgaaccttgagttgaggctgaggattaaatgttgctatggactgaatgctgatgtgctcccaaaatgcatatattgaagccccaacccctaatgtaatggtattattaggagttggagtcttgggaggtgattaggtttagatgaggtcatcaggatggggtccttatgatgggaccagtacccttatagaagagtatagaagacagcaggagtttttgtgccctcttcacacccaacccttcccaccagagccgtgtgaggatacagcaagacaactatctgcaagccaggaagacagccctcaccaggaactggatcacttggcactttgatcttgtactttctgccttcagaacggtgagaaataaatatctgctgtttaagccatccagtcaatggtatttcattacggcagcctaatctgactaagacacatgttagtaatggatccctgtaatcttcctaagtttttctaataataatgaggttatgttggtgattgttttcgtaggaaatacacactaaagtatttggggtgacaaagcatccggcaacttatcctcaaatgagttggagagaaaaaatttctttcctatttcttttcttttccttttttttttttttttttttttgcgggggtggtcgggacagagtcctgctctatcacccaggctggagtgcaatggcacaatcttggctcactgcaacctccgcctcccaggttcaagtgattctcctgcctcagcctcctgaatagctaggactacaggcgcccaccaccacgcccggctaatttttgtatttttagtagagatggggtttcaccatgttggccaggctggtctcgaactcctgacctcaggtgatccacccacctcagtctcccaaagtgctgggattatgcgcatgagccaccatgcctggtcgaaaaaatttctttgggtcctccaacttttccacagattttttattgaagattaaaaagacagatgttaaagtaaacaaaaaagattcaggaactattgttgccatgagcctttaatgaaggcatctactggagaacaaacttcagaatactaagaaatgattaggcaggttccagttttggcaaagggataatggtaaatactgagtatatttagaactaggacaaaatgatggggtaggggtgccaggacaatatataacggtgatgtgtttgatagtgtagacaaaatgcaaccatcaaaaatagtgggggagaatgtatagaataaactcaagctgggcgtggtggcacacgcctgtagtcccagctacttgagaggctgaggtgggaggaccacttgagcccaggaggtggaggctgcagtgagccgtaatggtgccactgcactccagcctgggcaacagagtaagaccctaactctaataataacagtagtaacagtaattaacttgttgattgtcttattgctgttaactgagagtaaactaattttattttaagttagatgctggataaaagggaaaaaaaagagagaggaagaattacaagctatttaaaacattgctcatgatagggaagccaacacagtaccaaaataggtagggaggtggtatttaggttattatgtaaaggtattactataaagataaccattaggagacaaaactccaagcctttctaaacaccaaagggaatatcaagagagacaaagacagagaaagaaagagagagcaagagagagaaaaccaaaacaaagacactacagagaaactaagtgcagatgttgctcctcttaggatggggttacatcctgataagcccattcattgtaagttgaaactgtcgtaagccagaaatgcatttaacgcatctaacctactgaacaacataacagcctagctgaccttaaacacggtcagacacttccattagcctacaattgggcaaaatcatctaaaaaggctgttttataataaagtaagtgctgaatatctcatagaagttattgaacattgtactgcaggtgaaaaaatagattggttgtacaagtactcaaagtatggcttctactgaacgaagatcacttttgcatcatcgtaaagtcaaaaaatttaagttgatccaatgtacgccaaggaccttctgaatacaaagaaaagggtcactgcactcaggccaccacctgtctcaagcgagacaggacaacaaaaatcactgctcatgttcttccaaagcaccaccccaagtgtgccagacacaccaccaaagccaggtgccctgggaaatagcccatgtgacacatggcaatgggaaaatgacaaaagtccacgtctcttttcaggaactagagaaagactcatcttcaaaatcaaaacgtcgtgaaagtttggtaagagttttctacacagctatgatctattttaggaacaaacaccttttcaagagaatgctttccagacaaagaagctgatagaaagggcggaaatcctcccaggataggatcacaaaggacccatataaaaaattcttaaagaaaaatgacgttaccttttctctgccagaaggatccatgctctgaggcttgtaacaatgtccgggtcaccagagtatatgttcacagtagtcttggcagacaaggaagttgcaaattatttatctatgaaaccaaaaaataatattcctaaaaatactggttacactgctaattatttaagtctatttagcaaacccattgctctttatattttctatttaggtactaacatcaaccatttacacacagctggaaatctttttgaagaattaattatctaagagaggaaaaaaggaaaatagtttcctcccacatttaagcaactagtatcttctcttcccgtctggtgaccttgagggacagaagtttccaataatctctgcaagtggccattccaggcactgacaggctcatgtgctgtgatccagtgggacatcacagaagcaaaaggcttggcccttcccgttcacacctgtcttttgtcctagatattccagataaatacaaacaggacaagatcagcgaaagacccatcaggagattacatcagtgctacaggatggctagataaatcagctttgggagtctggggccctggatgggagtccaacatgtcctaagtgtgaggccttcactggccttcactctgtctcagattcctgacctcgagaccagcttcacggtcatgcaacttgcacagtcacacacggcccgtcacttagaagtacccatctatggtggctcactcctgtaatcccagcactttgggaggctgaggtgggtggatcacctgaggtcaggagttcaagatcagcctggccaacatggtgaaaccccgtttctactaaaaacacaaaaataaattagccgggcatggtggcatgtctgtaatcccagctattcaggaggctgaggcaggagaatcgcttgaacttgcgaggcagaggttgcagtgagccaagattgtgccattgcactccagttcaggcaacaagagcgaaactctgtctcaaaaaaaaaaaaaagtacccatctaacctcatcttttcagtcaggtaatccagtggaactctgagtctatcaccaacagccattgccctcaactccttccctagtcccattaaactatcatcacatcctccttacaccagtcctgattttaagtcaacacaattagcattgatctaacacatgccctttgccaagccctggagtaaatacagaggatacaaaactaagcaagacaatgttagctgagtgcagtggctcacatctgtaatccacacattttgggaggtcaagatgacaggatcaccggagcccaggagttcaaaaccagcctgggcaacatagcaagacccatctctacaaaaaaattaaaaactaggggtgacaaaaaattttttgtcacaatgtcctgcaattgtgacatgcgcctgcaatcccagctacttagaagtccaggcaggaggatcatttgggtcctgaaggtcaaggctgcagtgagctgtgatcacaccactgtgctccagcctagacagcagggcagtaccttgtctctaaaaataaaaaataaaataaaatttaaaagacatttctcctgcctatgactagctcaggaagaaagacagacatgaaaaacaaatgggccgggtgtggtagctcacacctgtaatcccagcacttttggaggccgaggcagacagatcatgagctcaggagttcaagtccagcctgggcaacacagtgaaaccccatctctacaaaaaacacaaaaattagccaggtgtggtggcatgcaccttgtagtcccagctacttgggaggctgaagtggcaggatcacttgagcctgggagttccaggctgcagtgagccgagattgcaccactgcaatccagcctgggtgacaaagtgagaccctgtctcaaaaataaataaataaaagcaaatgactatcacatactgcagtaaccacctaaacagacatgacttaaagatattgatggcacagaggaggaaagggccaactctgctagagtgattcaaacaagcttcagaccgatagaaatggtattagccgggttattcaagagtgattataagtttgctaggcagttggggtggggtggcaggggaaaagactagcataggaaaaaccaagaaggcatgaaagggcatgtcgaggccagactcagtgcttacacctataaacgcagcactttgggaggccgaggcgggcagatcacctgaagtcaggagttcgaggccagcctggccaacatggcaaaaccccatcactacccaaaatacaaaaattagccgggcatgatggtgcacccctggagttccagctactcaggagactgaagcaagagaattgcttgaacctgggaggagcaggctgcagtgaactgagatcacgccactgcactccagcctgggcgacggagtgagactctgtttcaaaaaaacagtaaaggaaagaaaaagcatgtggagattgtcaagctggtcaggacaaacaaagcttgtgaatggtgcacatgggaaggatctgagagagtaggccctgaccacgagacttgggttctgtgctactgagcttagacttcattcaaaggcagcagcagggaagaggttccctccagatttcagttttaaaatgatcgctctgccaggcgaggtggctcacgtctgtattcccagcactttgggaggccgaggcaagtggattacctgaggtcgggagtttgagaccagcctggccaatatggtgaaaccccatctttactaaatatataaaaaaattagccaggcgtgttggcatgctccagtagtcccagctactcaagaggctgaggcaggagaatcacttgaatccaggaggtggaggttgcagtgagccaagattgtgccaccacactccagcctaggttacagacagagagactccatctcaaagaaaaaaaatataataaataaataaacaataaaaacaaaaatatcactcttgattggatggagaagagcaagaccagagagatcagtcaggagattacaacagtgctgcagagtggctagacaagtcggccctgggggtctgcagccctgaattgaacgcaggtccatcacatccttagtgtgagggcttccgaggtctgcaattcctgaccttggaaacagcttcatggacgcgtgacctgcacggtcacacacagcctggcacttcaaagggctctgttgtccgtcttaaaattcttaacaacttttaaacaagaggacccgcattttcattttatagtaggccctaaaaattatgtagctgggccaggcgcagtggctcatgcttgtaatcccagcactttgggagctgaggtaagaggattgcttgagcataggagttcaagaccagcctgagcaacatagtgagactccatctccacaaaaattaaacaaaattagctggctatggtggcgagaacctgtagtcacagctacccaggaggctgaggtgagagtatcgcttgagcccaggagacagaggttacagtgagccaagatcgtaccactgcactctagcctgggtgatgcagtgagaccctgtctcaaaaaaaaaaaaaaaagaaagaaaagaaaaggggggatgggggcaaataagtaagttgtagaattattactaaaggaaacaagaggttgaactatttgaaatcaccatttctgtagtcaaaaattgccaagtatcagcaatttcatatggctcaactcaacacttcttcaaaatgtaggtagtcattcaaaagacaacattatccaaaaacatgacagtggcaaaaagaacattactcataaaaaaaaaaaaaaaggaagtaaatttaggaatcttaaaagggcatcgtttattactcttgtgatcagagaaaaatacataaatattaattttttaagtgcaataattccagaagaaagcaaacatatcactagaatggaacaagaaaagcaataaatgaacaaacatcctcgcagaaaccatagctgaagaacatatgtatgggtaaagaaacaaatactatagtaaaaatagttttatgtttgaattacaggcatattatggcacatgtgcaataagacaaaatgacaatttattaaaacatgaattctacttgataaaaaagcaaattagtgactgggtaattcctctatttattatttattgagctaataacaaatgcacaaagaaatgagacagaaggttttaaaacctattggagccctctttgtggaactgggccaatcaggatcttgcaggcagttctcactcatgatataaaaggccctctggagcattcagatgggcttttttaaaaatatacacagctgcttgacaccaggatgccacgatggggtaggttaaatggctaccaacagatacaaagcccccagcactttttaattccttaacctttttcattctaggtctaatgatacacttagaatggatggcagtggagggatgggttttgactccctcccccacctcaagaatattagcagatgcaggagacgacaattaaggtgtcaacataaggaaaatcaaaaataaaaagtaaccaaagagtttagatgatttgggtctatcctcagagctcaatcccgtctatcagaacatttgatgcagtgatttttcctttcttcttaaaatactgtctccctgcggctgctggctcaccatactcacctggttttatttccgttttcaaggacctctacctctctgttttccttgctgaatcctcttccccttcgcggcttctaactgttggagctcccccagggctcagtctgaagacctcttgtcatcccccaatacctggcggatttcatccggacctgtggctttacatgccacctctactctgagtaccgcgcatgtatctgtccagcccctcctggcaccctgagctccacacatgcttagcaagccacggatgctgcattttcatttgcatgtgtgatatggtttggatgtgtgtctcctccaaacctcatattgaaatgtgatccctcatgttggaggtggggctgggtgggaggtgcttgggtcgcgggggtggatccctcataaatggcttggtcctatccttgctgtaatgagtgagttctcactctattagttcacattgatgtgcagacacgcaggtgccaatggattgagctgattgtttaaaggagcctggcgcctcctcccctctctcttgctccctctcttgccatgtgacacatatgcttccccttctcttccaccatgaagcttcctgaggccccaccagaagccaagcagacgctgtgccatgcttgtacagcctgcagaactgtgagcccaagaaaccactttatcaattacctagtctcagatgttcctttatagcaacacaaaatggactaatataatgcctaataggtatttcaaattccatatgattaaaacaatgctcgatgctcccaatccacttctccagtcttccccgttcactgatgagacttaacactgggagccatccatcacagcccatctccaattcatcaacaagctctatgacctctaccttcaaagcgaatcctgaatcccaccatgtatcaccatctccacaaagatcatccccttccaggcacgactgtctctcacctggatctctacaatagcttcatgaccgtcacctgctccctacttaccaccccggggttccgagaaagcagccagagttttttctttttctgtgtttttttgttttgttttgttttgttttgtttttgagatggagtctcactctgtcatccaggttggagtacagtggcgcgatctggctcactggaacctctgtctccagggttcaagcaattatcctgcctcagcctcctgggtagctgggattacaggtgtgcaccaccacgcccggctaatttttgtatttttagtagagacggggtttcaccgtgttggccaggctggtctcaaactgctaacctcaggtgatgcacccgcctcagagcctaaagtgctcggattacaggcatgagtcactgcgcccggcatcctttttataatcagatcacatcatcattctcccacagaagccctgcaatggcctcccaccacccttggaacaaaccccactacttcaagacatggtagcataaattctcataattacatcagaggatgatccggcaatgccgagtaaacctgaagattagaacaccttctggcctcgctattctttatcccggtatctccctgagaaaaacgcttgcacagattctgtacagagatgtcactgcaaaaccacttatcagagtgaaaaggtataaaacactgattgttcctcagtagagacattgatacaaaaattaagtttgttccacatggtaaaatgctggcactagtcaaaagaaataaattagatctaagcatagtgtgctagagttaatgattcctgatgtttggccgctgacagcttccaagccacatcactggccctttcccttttgcccacacccaggcaagcctataagaaagtttgtgttctttatccctttgcatgggcagggaagtctaaaccatgcacacccctgcatggagccctccccaccccacttctaaccacactaaaaagcagagcgcctccacctcccaccctcactttttcactccaaaccaaatcgaagccttcaagaaatatttgtgatgttgactatgtgagcatagtcacgcaataaattgcattccatatccattggtaattgtgtgtcagcgtaggcaccctgacatccataaattccaggaggtggaggcagggggattgcctagcgtccagcaaggaatgctaaattcctaaataatacgtataccaggccaggtgaggtggctcacacctgtaatcccagcattttgggaggctgagccagggagaatgcttgatgccaaaagttcaagaccagccagggcaacagatcacgaccccatctctacagaaattttaaaaaattagccaggcatggtggcatgcacctatagtcccagctgttcaggaggttgaggtaggaggatggcttgagcccaggagttcaaggctgctgtgagccttgatcatgccactgcactccaacctgggcaacagagcaagatcctacctcgaaaaaaaaaatatgagagttagataagcctcaaaaacataatgttgattggaaaaaaagttgtgacaggatatcgtatggtatcgtttgtgtaataatctgttctagttctaggggttctgttttgctttaaagtctattttgtctgccattaatctttccttcagtgagaatttgttttatataaccttcatcatcattgtatattcaacctttgtgtatactgagactttagatgtgcaccttgtaattggctttttttttttttttttgagacggagtctggctgtcgcccaggctggagtgcagtagcgcgatctcggctcactgcaggctccgcccccggggttcacgccattctcctgcctcagcctcccgagtagctgggactacaggcgcccaccaccttgctcggctaattttttgtatttttagtagagacggggttccactgtgttagccaggatggtctcgatctgacctcgtgatccgcccgcctcggccttccaaagtgctgggattacaggcgtgagccaccgcgcccggcctgtaattggctaattttttaaatgatgtttagaacccaatcagatgattttgtttgtttgtttttgttttttgttttttgggttttttttttgtttttttttttgagacagggtgtcactctgtcacccaggctggagtgcagtggcaagatcttggctcactgcaacctctgcctcccgggttcaagtgattctcatgcctcagccacctgagtagctggcattacaggaacccacaaccacacccagctaatttttgtatttttagtagagacggggtttcaccatgttggccaggctggtctcgaactcctgacctcaagcgattgcccgcctcagcctcccaaggtgctgggattacaggcatgagccaccatgcctgactgatttttgtttttcaactggaatatttattcacccttaactataattttgtatatagatacatttattctcactattatcctatcgatgctttttctcttcatttttgccttttggggggatctatttcctatcttctcattccattcttttcctctactagttaggcaattttagactatgttctttaagcagtaacacaaggaatttcagcatccacaactaacttatccaatgttaacttcgactatatatttaccctcctcccaaacaacacaggacttcagaccactttaaccttaattactcctgtgtcagatgtataagctattgctgttatacatttttattttatttatttatatttttttgagacagagtctcactctgttgcccaggctggagtgcagtggtgcaatctcagctcactgcaacttctacctcccaggttcaagcgattctcctgcctcagcctcccaagtagctgggattacaggcacgtgctaccacacccaggtaattttgtatttttagtagagacagggtttcaccatgttggccaggctgatctcaaactcctgacctcaggtgatccgcccacctcagcctcccgaagtgttgaaattacattaaccccaaagcccttactgttgttgtacacaggcatgtttgtctgggtttacccacatatttattattttccttattcttcctttcttcttatacttcagacttacagctgggatcattttacttttatctaaaattcattcttagatcattgctgttcaatggaaatacaacatgagctcatgtgtaactttaagttttctggtagcaaaattttaaaaaattttaaagaaacaagtcaaatcaatttttttcattgtctaaggtaaatttattttactgttttaaaacaagcatgcatttccagtttccaatatgacaagggcaggcacttaaaatacacactcaaaattaattttgagtcaggcaaaattaattttaataaaacaaaaatatcccatgccaaaagcttgactcggtgtattttttcttaattaaaacaaaagtgtctatgaattatctgtgctcaaagattactctgtcattgctaacaaattagtatgcctcaatttccaagataaaacaagaaagtgttctcttgggaaactgtcatattaacagacagctgtgtgtgaacatagcaaatgctgaattctgaaggattcaggtcaaactgacagctgacttttacttatgctaatcaatttcatgtccactctctttataggcttttaagctgtactatttactgtactgtttattgttatatgcctcatgggcagtcctcagattttcagaggaaactttctaacatcagaactcaagcttttagcccattggtgagctagagctggctagcatcaatgtgcaacaactcattgttaaatatcaggaagtttgtgagttcaaccataggttgatgcgaaagtcattgcagtttctgctattgaaagtaatagcaaagactacaatgacttttgtagccacctaaaatggtttgaaattggccatggtgggagtatttcccccacggaaccagtgaacactaccagtcagggcttttttattgattacaccactgacacactattttaaatccctccttatttgcactgctggtttcccatttcaatttttttttttttttttgagacttgtttctattgcccaagctggagtgcagtagagtaatctcagctcactgcaacgcctgcctcctgggctcaagccaacctcccacctcagcctcccaagtagctgggactacaagcatgcaccaccacgcccagctaatttttgtattatttgtagagatagggtctcactatgtcacccaagctgtcctcaaaactcttgagctcaggcgatcctcccacctcggcctcccaaaatgctaggataacaggcatgagccaccgcacctggccagtttttctttttcaatattattttggctatttagatagctcacactttctgatttcaaaactactggaaccaaaaaagtgtggtactggcatcaggacagacgtacagaccaatataacagaatagagagccgagaaataaaccgtatatgatcaactgatttccaacaagggtgccaagaccattcaatggggaaaagacaatctttttaacaaatggtgctgagaaaactggatattcacatgcagagaatgaaattagacccttaccttacaccacatacaaaaattaactccaaatggatcaaagacctctatgtgtgagctacaactataaaacccttagaaaaaaacagggaccaaaaggaagaagcaacccacatgtccatccatagatgaaaggacaaacaacatgtggtctatacatgcaatggaatattatttgggcataaagaagaatcaagttctgatacgtattttcaacatagatgaaccttaaaaacatgctgaatgaaacagggcagacatacaaggacacatactgtataattccacttatttggaatatctagaataggcaaattcatagagacagaaaaacaggggctgtggtgatgggagaatggggcagtattgcttaataggtacagagattctattgaaggtgaaaaagatgtttggaaatagtggtgatggttgcacacattgcgaatgtaatttatgccactgaattgtacacttaaaaattgttaaagtagccaggcgcaatggctcacacctgtaatcccagcactttgggaggccgagctgggtggatcacctgaggtcaggagtttgagaccagcctgagcaacatggtgaaaccctgtctctactaaaaaaatacaaaaattagccaagtgtggtggcaggtgcctgtaattccagctactcgggcggctgaggcatgagaattgcttgaacccaggaggcaaaggttgcagtgaaccaaggttgcaccactgcactccagcctgggagacaaagcgagagtgtctccaaaaaaaaaattgttacagcaataaattttatgtttatatatatatatatcatatatgtatgtatatatattcatagaatctttatgtaaaagcttatcattctttattcttaatattatttatcttgatgctcaaattctcccagatctggccagtggcaactctgccaaactggttcctgcatcctttggacgtggctatatcatctttgaagacttccttattttcttctttccttttttgcagctatatgtatatatacacatacacacacacaatatatatatataatggttctttaggctgtacaggaggcatatataacattttatatatgtacatatatatacatacttagatacatatgtacaggaggcatatataatgttatatattatatatacatatatgtgtgtatatatataaaacattttatatatgtacatatatgtatatatacttagatacatatatatgtacaggaggcttatataatgttatatataatatataaatgtgtgtatgtgtgtattattgcaaaaaaggaaagaagagcataaggaagtcctcaaagacgatatggacatgtcaaaaggacacaggaaccagtttggtggagttgccactggccagatctgggagaatttgagcatcaaaataaataacatttataataaagaatgagaagcttttacataaagtaagattcgatgaatatatactgaatgatatggtttagatctgtgtccctgcccaaatctcatgtcgaattataatctccaatgtcagaggtagggcctggtgggaggtgattggatcaaggaggtgcatttcttatgaatggtttagtgccagccccttggtgctgttcttgtaatagtgagtgagctcttgttagatctggatgtttacaaatatagcacctcttctctcactctcgctctcttgctcctgccttggaagacatgcctgctcccccttcaccttctaccatgattgtaagtttcttgaggcctccccagaagcggaagatgccagcatcatgccccctgtacagcctgtagaaccatgagccaagtaaacctctttcctttataaattgcccagtctcaggtatttccctatagcaatgtgagaagggactaatacactaatataaataaataaacagcagaaatgtatctaatacacatagaaagaatgatggaattagaaagtcaccatgtgaggggcttaacagtaacaattgattcaggcaagagtgatcagcagcctaaaatgagtaaggaaaagtttgagtaacataatatttacagagcctctatgcactccccagaagatacttaataattagaaagaatgaagttacagtggggtgtgtatgtgcatgtgtgcgggtgcatgcaggcacatgtgtgtacacagtcatgcaccacatgcaatgtttcagtcaatgatagaccacatttttaccataactttgctatgtttagatatgcttagatacataaatacttaccattatgttacagttgcctgagcattcagtacagtgccatgctgtacaggtttagagccttggagccgtaggttataccacagagcctaggtgtggagtagtctctaccacctatgtttgtgtaagcccactctctgatgttctcacaaagacaaaatcttctaatgacagattcctcagaaggcatccctttcattaagagaagatatccctagccacctacccaccaaactatccctgcaaaaccctaacccccgagccttcggggagactgatttgagtgatagcttcagtctcccacgtggccaacctcgcattaattaatttaagcaacacatgactatatatccatcaagacagagaaagagaaaagataagacaaatgtattaggcaggcacagtggctcacacctgtaatcccagcactttgggaggctgaggcaggaagattgtatgtatgtatgtatgtatgtatgtatttatgtatgtatgtatgtatattttgagacagagtctcactctgtcgccccagtctggagggcagtggcacaatctcagctcactgcagcctctacttcccggtttcaagtgattctcccgcctcagcctcctgagtagctgggattacagatgtgtgccaccatgctcagctaatttttgtatttttagtagagatgggatttcactgtattgtccaggttggtctcgaattcctgacctcaagtgatcctcccacctcagcctcccaaagtgctgggattacaggcataagccaccatgcccagccattattattattattattaatattattttgagacagagtctcgctctgtctcccaggctggagtgcagtggtgcgatctcagctcactgcaacctccacctcctgggttccagtgattctcctgcctcagcctcccaagtagctgggattacaggtgtgcaccaccatgcccggctaattttggtatttttagtagagatgggatttcaccatgttgcctggattggtcttgaagtcctgacctcaagtgatcctcccacctcagcctcccaaagtgctgggattacaggcaacagccaccatgcccagccaaaaatgtatttaaaaaaaaattagttgggtttgatggcatacaccggtggtcccagctacttgagtggctgagcagtaaagcatattggagatttttttgtattaatcttacaacttttctgtaagtctgaaattatgccaaaatgaaaagctcaaaataaaagataaacttcaaataaagacattttagataaacaaagatggcgagatttcaggatcagcagacttgaaccaatgaacatgttaaagtacatattttaagcagaaagaaaatgattccacatggaatgtcagagatacaagaaggggtgaagaggaaagaaagtgttgagcaggtcatcagtgtaaatgaacaccaacttcataaagtacagcaagtcctcaaatcatgttgtttcattataatgatgagaaaaaaaatcactttccagtctacacatcctccccttacctgtgtgggttttctccgggtcctctggtttcctcctgcattccaaagatgtgcatgttaggttgattggcatgtgtacaacgtcccagtctgagtgagtgtgaaaccacctttgcaaagatgatggcagtgagagaagcctaacatagctgactccatcttgcctccagcctcacaggctggctgtccttgctcattcctgggcagaagccaggctaaccacgggaggaatttatttgtagtttaactttaaagcaaggatgaaaatagcccttcccaaaactaaactgccctataaaactaatgaaagaccacaatgttaggattccgggaggagcccaaattctgctaagatgtaggcatacttaaacaatagccagccattgttttggaggtcacaagatttgtgcaagatttcataagatttgagtgacttcctcaattactcctatagataagatcactattgtagaacctaaggttggcctttccagatgattttttggactttcacatttctgacgactggctgactccacccagatggggactcatgactcaactggtcctgtggtccccattcagaggtggactcagcacacgaggacagttttccacacccctatgatttcatccccaaccaatcaacattccccattccttagacccctgcccaccaaactatacatgaaaaaccctaatctctgagcctttggggagactgatctgagtgataactcccattctccttttggctggtcttaggttaattaaattctttctttactgcaataccatggtctcagtgaactggttttttctttgcagggggcaggaaaaacgcacagggcgatcacaagtatgggtgtgtgtgtgagcgtgccccccagcaggagggcatcttgtccggggctggttcctatcttatgtcctgagctgctgggataggccccagccactgaaaccctgaactggaataactgggtaaatgttatcttacttgtttttattaatctttctcaaatgtatgtatagctcacatttatttccatgtttaatattaagagtattttggtctttatttagaagttctgttatatttttgtgaccagaaatatgccataggaacttaactcttgcttagatcaattagcctatggtaaaattagtttcattatacatcatttcacttaagatagaagtttccaagaatctattgaagactttaagtagggaattaccataattataaaaatgcctctgggggatttaaatatatataaagtaagacagacaataataatagcatgtaagtcataatgggaaataaatgtagttaatgtgctggaaggtaaatatattgttcaggtggatagtaaaggatttgactaacattatattttcataaattttcaaataatttagacttctagggtaaccactacaggggagcagaggagggtgataaaaatcatttttaaaaaatccattcaaaagaagtcaagagaaaataaaaaaaatccaaaagaagagaagaaggaaaatgagacataggaatcttcactctacaacttcccaggtgattcattcatataccaacccatcgtgatgaattcaagaaatgtgctacaattctgttgttactagtaatacccgtaactgtaatgctaatagtagctgtagctgtaataggtccattgtccaatgcacccagcaagtcaatacacagagacatcaggttgcagcagagaaaaaggtttaatggtaaggtcacaaaatgaggagatgggaggaaacctcaaatccatctccctgaggaatttggggttagggttttggagcaggctaaagtgtgcaaattgttggtggatggaagagtgcagggtgaactcctactgcagggagaggaagaagctgtgttctcatgcttatcccaatcctttgtgaggtcttcaaattggttgctagaatttcgggtctgaaaaacatcttaagccatccttaacaaaagccttatgagtctaatgtcagagatcctgtctataggagcaatggggtgccaatgatcaggatctagcaccacatgactttcagctacaaggaagtgggccaaagtgcagcctgattgatgcttaattataactatacttctgtccataaccagacatgcaattcttgccacccctgtgaggatggtgatatggtttggctctgtgtccccacccaaatctcatggctaattgtaatccccatgtgttgaaggtgggacctggtgggaggtgactggatcatgggggtggtttctaatggtttagcaccatctcctagtgctgtcttgtgatagcactctcacgagatctggttatttaaaagggcgtggcaactcccccatcaagctctctctctctctcctgcctccatgtgaagaaggttctcgcttcccctttgcctcctgccatgattgtaagtttcctgaggcctcccagccatgcttcctggtaagccagcagaactgtgagccaattaaacctcttttcttcataaattacccagtctcgggtagctcttcatagcagtgtgagaacagactaatacagatggtttaaataatttctcagaaatgttactaaatcgtatcagtccatttcaagccaatagaagaagttcctgccttcaaatccaaatccatctcattcataaacagcatattttaatctatctgtttttgaaatctccctcttattcaattaatttccctggcctctctgatataaacacagcagaatgtccacaaagcatagattcaaagtaatacttcatttctcacccaaaaacatacaaaaaataaaaagtttgcagtgtgatttgttgtgtcttcttttttttttttttttttaatttatttttttattgataattcttgggtgtttctcacagagggggatttggcagggtcatgggacattagtggagggaaggtcagcagataaacaagtgaacaaaggtctctggttttcctaggcagaggaccctgcggccttccgcagtgtttgtgtccctgattacttgagattagggattggtgatgactcttaacgagcatgctgccttcaagcatctgtttaacaaagcacatcttgcaccgcccttaatccatttaaccctgagtggacacagcacatgtttcagagagcacagggttgggggtaaggtcacagatcaacaggatcccaaggcagaggaatttttcttagtgcagaacaaaatgaaaagtctcccatgtctacttctttctacacagacacggcaaccatccgatttctcaatcttttccccacctttcccacctttctattccacaaagccgccattgtcatcctggcccgttctcaatgagctgttgggcacacctcccagacggggtggtggccgggcagaggggctcctcacttcccagtaggggcggccgggcagaggcgcccctcacctcccggacgaggcggctggccgggcaggggggctgacccccccccacctccctcccggacggggcggctggccgggcggggggccgacacccccacctccctcccggacggggcggctggccgggcggggggccgacccccccacctccctcccggacggggcggctggccgggcggggggctgacccccccacctccctcccggacggggcggctggccgggctgaggggctcctcacttcccagtaggggcggccgggcagaggcgcccctcacctcccggacggggcggctggccaggcggggggctgacccccccacctccctcccggacggcacggctggccaggcggggggctgacccccccacctccctcccggatggcacggctggccgggtggggggctgaccccccccacctccctcccggacggcacggctggccaggcggggggctgacccccccacctccctcccggatggcacggctggccaggcggggggctgacccccccacctccctcccggatggcacggctggccaggcggggggctgacccccccacctccctcccggatggggcggctggccgggtggggggctgaccccccccacctccctcccggacggggtggctgccgggcggagacgctcctcacttcccagatggggtggctgctgggcggagaggctcctcacttctcagacggggcagctgccgggcggaggggctcctcacttctcagacggggtggttgccaggcagagggtctcctcacttctcagatggggcagctgggcagagacgctcctcacctcccagacggggtctcggccgggcagaggcgctcctcacatcccagatggggcggcggggcagaggcgctccccacatctcagacgatgggcggccgggcagagacgctcctcacttcctagatgtgatggcggctgggaagaggcgctcctcacttcctagatgggatggcggccgggcggagacgctcctcactttccagactgggcagccaggcagaggggctcctcacatcccagacgatgggcggccaggcagagacactcctcacttcccagacggggtggcggccgggcagaggctgcaatctcggcactttgggaggccaaggcaggcggctgggaggtgtaggttgtagtgagccgagatcacgccactgcactccagcctgggcaccattgagcactgagtgaacgagactctgtctgcaaacccggcacctcaggaggccgaggttggcggatcactcgcggttaggggctggagactggcccggccaacacagcgaaaccccgtctccaccaaaaccagtcaggcgtggcggcgcgtgcctgcaatcgcaggcactcggcaggctgaggcaggagaatcaggcagggaggttgcagtgagccgagatggcagcagtacagtccagcttcggctccgcatgagagggagacggtggggagagcgagagggagagggagagggagagggagagggagagggagacggagagggagagggagagggactgtgtcttctaataatatgcaacataacaacaaaaaaaaagcccaactagcagaatttaatgttacccaataaatgggtaatctaatggcaatttaatgttacccattccttacactttttttttttcttttgagacagggtcccactctgtcacccagactgcagtgcagtggcacaatcacagctcactgcagccttgacctcctaggctcaagtgatcctcccgcctcagcctgtcgagtagctgggactacaggtgtgtgccaccatgcctggctaatttttgtatttttttaataaagacagggtttcatcatgttgctcaggctggtctcaaactcctgggctcaagcaatccatcggcctcaggctcctaaagtgctgggattacaggcatgagccactgcacccggccattccttacactttaagtgaaatcttttagctcattgaaacagcaaattgaagttaccccttaaaaaaccacaaaacagttgagatcacttgctgctaatcctgatgtttggcctagaataggtgatcaattcccaatttaaaagtacaggcaaataattaataaagaaatttaaaaactacaggctgtgtaatgaatttaactacagcaagacactgacctcaagggcagtattattgtaactatttttaagaattacaacacagagctcattatgtgtcagtcacatttcaacttacaaaatagctaacaatggatttgacattaactttataataaatttaatcatcatccctacagacaaggatctaattttactgcatgtaaagggaaaatatacattgccattctcctaaagacctgatgagttatgagtcttaaatttaaatttgttttagaaaatcatgtctcattgctcccatacacttgtgccagatgaagtgaatagcaaattattccccaaaggacatggacagacaaagacagacagacagacacgcataaactcacacagacactcctttacagccatgacaaatatagctgcattgttaaaatgtcaccaatttttttttttttttttgagacagagtctcactctgtcacccaggctggagtgcagtggcatgatcttggctcactgcaacctctgtctcttgggtgcaagtaattctcctacctcaacctcccaagtacctgggattacaggcgcccaccatcacacccagctaatttttgcatttttagtagagacagggtttcaccacgttggccaggctggtctcgaactcctgacctcaggtgattggcccgcctcagcctcccaaagtgccgggattacaggggtgagccactgcacctggccaatgataccaatcttttaaggctccaccttcaatgctccctggtccacaatttctcaaactagatgctttcactgataagttttctggcattctctttattctacatttgttccttgagctcctgagaacaggaaccagattttacttcacattgggtcgtgccatgccttcccaacactgacagtttggaaaaagcagattctcaacagattactattggggaccctttaagccaatgtgccaattcatcaaattagtttggtttttctacccaagcagaactcacacttctacaatatatgtttcttcactaaagaataaagagccggttaagagaattcatttctttggccctaaaagcaggcacaatgataacttaaactgttaagagaaataaatccacagccctaagccttgctgttcctattataagagctaaaaacctaagctgtcgccctcagtacctgccaaagcttccaactgggccctgatttgtgaagagcaaaggccttacaggcgtcttgtgtggaagtcaccaggtcttccctaccagcggggagaaatatctaagccagccatccatggctgggtgtttaaatgataaagaaaaaaaaaaaagaagaacattttgaaaaaatcaagtgaccaaaacttgagagaatattatgagaatatcaaacacaatggagctattttaaaagaaagcagaaatctggaataatgaaatcggcaagaagaaaacactaagagcaaaaatacatttatacataagacaactatttttcaaaattcttgctcggctttggatgttctgtttgcctcccagctacaaacacattcttcacacacgctgggaatgctgctgaaaactagtcagcattcagaggcttaatccacagtcccggcgctgtgcctgtgggcttcatcgtcagacagccatttgtcctcaggagaggttaggggttgaaatgcaaatatgcaaacaactgagttcttgccctaaaatagctgagaaaagcatgatcccttatgctatcttttaaaaatggaaaaagaagaaaaaaagcttacaatcttaaggatttgtttaaataccttagtatgttgcaattttgaaggagaaaatgatggaaaggaagaaacacacttgtcctgggtaaaatctataatctggagaaaaggttgacatacgtgtgacacttgatttaccagacccactaaagatttattgatttatcaatcactgcctcaggcacttgatttcccccaagggagaattaacaattcccgccaactgatggattctattgtgaactaaaatgaatgcaagaatctatcctctccctgtgcacaacctccaattaccaaacaaacaaaaaaaaagtgtatctctctgtttggggaatccttaaaatccttaaaattaaaaattatttaacaaaagaaatactgtattaagtaattgtcactgggccgggcgcagtggctcacgcctgtaatcccagcacttggggaggctgaggcgatggatcacctgaggtcaagagttcgagaccagtcaggccagccaggcaaaaccatgtctctactaaaaatacaataattagctgggcatggtggcgggtgcctataatcccagctactcaggtggctaaggcaggagaaccacttaaacccaggaggcagaggttgcagtgagctgaagttgtgccactgcactccagtctgggcaacaaagcgagactccatctcaagaaaaaaaaatcacccttgatgccaatagacatttttaaaggatgactttaacaagctctaaaggagatacgggcatcacagaaatgtgatttcataacgtggataggaacatgatcttttatgttaaattaccaggattgactgtagcctccaccacttacgagatgtgttatcttgggcttctttaagcctcagtttcaccatctataaaatgaggagatacacttgtccttaggaaaatgagtagtgaggatgaatagaatgcatctggcctagcctctgacatgcagtcagccttccatctggcagttccattcccattactgtcactctaaaatcatatgaagtataacactatggaaggccacacagacaggctccagggctgaaacagttcacagagtatgacaaagcgcccttaacgcttttgcaaggctccttcagtgtcaactaagtgacagcttgaaaagatgtacttattaactaatatatggattaagctttctttaatattacccactaatcagaaaatctaaatctatcagaagattctaaagcaaatatgagtaaactatagcctgggtgtcaaatctgttctaccacctatttttgtaaataaaatattattgaaagtgtaggggcagaaagggggtaatcccctgtaacaaaaggcaggttaacaatagaaaagtataacaaattttttacatgcacacttatgcagggatgtcacagaaaatatgaaaactcaaagagcccagtgagtgattattattattattatttttatttttagacaggatctcactctattgcccaggctggagtgtagtggtgccatctaggctcactgcagcctcgctctcctggactccagcaatcctcctcccacctcagcctccagagtagctgggactacaggcatgtgccaccacgcctggataatttttgttgttgttgcagagatggagttttgccatgttgccaaggctggtcttgaactcctgagctcaagtgatccacctgccttgacctcccaaagtgctgggattacaggagtgagccacagttgagtggaatttttatgctatcctgaggctacagaaagaataaggggcttggggcttccagaagaggtagcacacaggttatgggaaaaggaaagaaggaaaatttgtcaaagtggtcttgtcatgcaaatgaagcatcacaggtagcagctctcagaaagaatagaagtggactgtggcaaagtttctctgacaaacctttaaacgtgttaggctcttagtctctttttcctgtgagctcatctttcctagatctggagaagagggtgctcagagaaagcctggctgcttatttcactaatgtagattttctctacagatgcaaatctcctccaccaaagacagcttttcagggctattcttgtctgcagtttctctgaataattatctcaaaatatgccaaagaagtctatttttggggtgaaatattctggtttccttcagaacacattcctatattgtttatggctgtttgggtcctacaatgacagagttgagtagctgtgaccgaagccatatggcccactgttctccccacagtgagtggtgagggatggtgagggacaggaggctttatgcagacctcaggagaaacttttgaaaggattgactcttaccattttgttgctgacagttccctggggtgagaacacagcaacgccctgcagggccaccccaaggaagcaagcaccagagacggcagcagggaaggaaagggttaggcaggacaagcaggtttaggattggccaattttcatgatttcagcaagctctggggcttaggagctatccctatcagatatcagatatctggctctgggcaattagggcaggtgcatagtggcctaaagcatgagaggtgaggcagtttggggtgtagactttgtttgtttgtttatgtgtgacaggatctccctctatcaccgaggctggaacgcagtgacacaatcttggctccctgtaacctcaaccttccagagtcaggtggtcctcccacctcagcctcccaagtagttgggactacaggcatgcaccatcacacccagctaatttccttgtattttttgtagagacagggtttcgctatgttgcccgggctggtgttgacctcctaggctcaagcaatctgcctgcctcagtctcccaaagtgccaggattacaggcgtgagccacggtgcccagccaagaagtatgacttaaccagctgcctaagaaggggatgtgaccagcctctagccaaggtctcaaaactgtgtcaaggcagcatttttttaaaaacatatttcacccgcgaagccaaaattgtttactgtttgctgacccatggtccataaacgaagtctagatatctggttccagttggaagtcacaacccacatcttaaatgtgctttccacaaatgtttatggtgataactcaccacaaatgtttatggagataactcagggaatataaaataggttaaattttcccacattgagaatgaatgaaacatgtcctagaagtcacggggtcggttctcagccccagtctcagtcctgcaggtcatggcaagccccacaactcagtggcagttcccaacaggccaggggtgagcagagtctatactgtggatgtcaccatggcaatggagcccagtggtccgaagtcagacaagcccatgttcaaatgttagttctaccacttatcaacagcatgatcttgagcaagttacctatattggttatctgctgatgcataacacactatgccaaaacctagtagcttaaataattgtcatttaacatctcctgcaatgtctaaggatcaggaatcctggggcagcttagctgggtggcttgggctcagagtctctcagaaggttgtagtcaaggtgccagccagggctaccaccaaccatctgaaggctcaaatggggttaaagaatccacttccaagttcatgcatgggtagttagcaggtgatagggtttggctgtgtccccacccaaatctcatcttgaattgtagctcccataatccccacgtgttgtgggagggacacagtgggaggtaattgaatcatagaggtgggtctttcccttgctgttctcatggtggtgaataagtcacatgagatctgatggttttataaacaggagttcccctgcacaagctctctcttgcctgccgccatgtaagacatgccttgcttcccctttgccctctgccatgattgtgaggcctccccagccatgtgaaactgtgagtcaattaaacttctttccttcataaattacccagtcttgcgtatgtctttattagcagcatgagaacagactaatacagcaggtctcaatgcctcactggctgttaggcagaggtctctgtttcttatcccatgggtcactccatgggctgcttgagtatgctctcaatatggcagctgacattccataggacaagtgatctgagggagagagagagagagcacgcaagacaagacagtgctcaagaaggaagccagtcttttatgcctaatctcataagaaggacagcctcacttctgctgtatgtaattggtcccacaggttaaccctggtacaagatgggaggggactacatgagtatgtgaataccaggaggtggggatcattgtggggggctggctgtgcattacctttatttaagcttcaggtcaggctgggtgcagtggctcatgtctgtaatcccagcactttgggaggtcaaggcaggcagattgcttaagcccaggagtttggaccagcctggcaacatagtgagaccctgcccagaaaaagaaaaaaagctttaggtctaccatttatgaagttagaatgataatgataatagtacctggtttataaggtttaaatgagaaagtgctggccgggcgtggtggctcacacctgtaatcccagcactttgggaggccaaggcaggcagatcatgaggtcaggagatcaagaccatcctggttaacacggtgaaaccccgtctctactaaaaatacaaaaaattagccgggcgtggtggcgggtgcctgtagtcccagctactcgggaggctgaggcaggagaatggcatgaacccgagaggtggagcttgcagtgagctgagatcgcgccactgcactccagcctgggtgacagagcaagactctgtcacaaaaaataaataaataaataaataaataaataaataaataaataagaaagtgcagtcaagcccactcacagggcttggcactcagtgaagcattctgtaaatgcttgcaattattatctacctcactgtggccactcctgccactaccacttccataataataacaaaagggtaaggggaacccttccgcatcacagggaagtttcctgtccttggccacttctgggtgagctctctttccgctttacaagggcaaccgtaactgtctgaaaaaataaacctccaacaaattcaaactagtctctttttctctcaccttgacctaaaatctttgaaacagacacccacataactcctctagaaaggcaaacccaaaaattgtcagagtaaaaaattcaatgacttaagataaaggggattatttccttagaaataaactcatttaagaaattgtagaaacttcagacatatcaatttcaatattcaaggacatcactcattcaacaaatatttactgggcatgtgttatacatcaggcatggctctaggagctgtataaacaacctggaatttaacagatgaaatctctgcccttagaaatttgcaggctagtgggaaataaacaaataggttttaaaaaaataaaaaatagagtatgttagctggtattgagttagaagctggtaatgagttagataaaaaataaataaaggccaggcaggctgctcactcctgtaatcccagcactttgagaggccaaggcaggtagattgcttgagctcaggagctggagaccagcctgggcaatatggcgaaatcctgtctctacaaataaataaataaactaattaagtaattaattaaagatggaaagtggatgggatgatgttaaaattatcaatagatgatcaaaaaaagtttcactgtcatttgcacaaaatccaaaaggaggtgacaagatgagccatgaggatatgtcctgaaagggtcaagtgcttggccttcagagaagagcaagtaggccaatgtgtctggagtccaataaggctagggtagaaatggtggcagagaaagttagagaagtagattgggggatgcagaatcaagcgcagtcttgtaggctgttgtaaggacttggactgggtccttacaacaaagaggcaccattggcaaaagaggcaccattgggttttgagcagaaatgtgacataatgtgatttacgttctaaaagcattactcttagacaactaaggggagtgaggacagaggcagagagagccatcaggaggccactatgaaaatccaagtgaggaatcatggcagcttgaaaaggatggcaagacagaagttgtgaaccttggtcaggttctggatttgagtgggagagtccagagtctgttaatgaagtctatgtgagctgtgtggtaaagagaagagtcgcgaatagctttgaattttttgtttgcttgtttgttttttgagacagtcttgctctttcttctaggctgtagtgcaatggcataatcacggttcactgcagcctcgacctccctggctcaagcagtcctcccaccttaacctcccaggtagctgagactacaggcatgtgccaccacgcctggctaatttttattttttgtattttttgtggagacagagcttcactgtgctgcccaggctgatatcgaactcctgggctcaagcgatcctctgaccttggcctcccaaagtgctggagttgcagatgtgagctgccacacccggctgctttgaagtttttgacctgagcagcttaaagaatgcagttgccatgtacagagatataaagaggtatggaaagagcaatgtggttgcctcaggagtacagtgtgggacatactgagtttgagataagataaccgtgggacatccaagtgggatgtaaggagacaagtgatagacaagtctggagctcaggggagaagtctgaacaggggatataaagttgaagtttccatgatttgagaagatatttccatcattagaaatgatagttaaagtcttgaggctaggagtaagtgcagacagagaaaagacctaagatctaagccctggggcactccagcatttagaattgggagaaatatggccggtcacagtggctcacacctgtaatcccaacactttgggaggtcagggtgggcagagcacttgaggtcaggagttcgagaccagcctggccaacatggtgaaacccagcctctgctaaaaaatacaaaaaagttagctgagcatggtgacacgtgcctgtaatcccagctacttgggaggttgaggcaggaggatcacttgaacccgggaggcggaggtcacagtgagcccatatcatgccactgccctccagcctgggcaacagagcgagactccatctcaaaaaaataagtaagtaaaatatagttggggagaataaagagaaaacagcaaaggactctgagcagtgaccagtaaagtcgaaggaaacccaagagagtggcatgtgtaaagccaagtggagaaatgttctccagaagggagtgacgagctgtgtccgatgctgttggggtgtcaagtaccatgagcaagtgaactgaacaggtgcagggaggtcactggtgaccttgatatgagaggtattggaggagtggtggaggtgacgccccactggaatgggaggagaactggagacagtgaagatggataactcaaggatttgggccataaacaaagcagagaaatggatggtaattggagaacatggtgcaatgaaaggaattcactcatgatccacataagctaatgggaatattccagtagagaaggaaatatccgttgatggtgcaggaaagaaaagagggaattgcttcagtgggtccttgagaaggcaagaggggaaaggatctggcgcctggtcaggggcgggcctcagacaagagccagaaagtccatctacagtaacaggagcagcgtgcctgggcacaaaggcaggaacatggatagatgtgtcccaccatgctccggccctccctgctgcactgctgatcaggcaggttgtaattaccaccctgtgtgtctgcctgtgtctccaagacctatgagagagaaagaccatgtaggtcaacatcgcactttcagtgcccaggacaaagcctggtgcagagcaagcactcaacaagtatggtgaatggctccttgcaaaacgagacaatatcgatcttacctggcagatattaaaaaatcataaaggtagaaattgtaatgcaatgtggcaatggcacaagacaaaacagacagatcaatggaacagaatttaaaaactaaaaaacgccgggtgcagtggctcacgcctgtaatcccagcactttgggaggccgaggtgggtggatcagttgaggtcaggagttcgagaccagcctggccaacatggtgaaaccccgtctctactaaaaatacaaaaattagctgggcatggtggcacatgcctgtaatcccagctacacgggaagctgaggcaggagaatcacttggacccagaaggtggaggttgcagtgagctgagatcacaccactgcactccagcctgagagacagcgtgagactgtctcaaaaaaaataaaaaataaaaatctggcccggcacagtgggtcatgcctgtaatcccaacactttgggaagctgaggcaggaggattgcttgagcccagaaggtggaggctgcagtgagccgtgattatgccactgcattccaccgtgggcgacagagtgagaccccgccaataagcagtaatggcataaaatgcttaacaaatgctgtcaatacaacctgatacaataatacaaatattcaggaaaaataatgtttgctatgtcatatgacacacaaaaatgaatcaccagccgggcatggtggctcacgcctgtaatcccaccaatttgggaggccgaggatcacttaagggcaagagttcaagaccagcctggtcaacatggtgaaacccccacccccaacccatctgtactaaaaatacaaaaattagctggatgtggtggtgggattacaggcatgagccaccacgcccaaccagaaagtggtttcttgagatggaatctgctcctggtgaagatgctatgaacattgttgaaatgacggcaaaggatttcaaatattccataaacatagttgataaaaaggtggtagtgtttgagaggatcaactctaactttgaaagaagcactatatgcaatgatatcacacagcactgcatgctacagagaaatattttgtgaagaagcccatcggtgtggcaaattttattgtcttattttaagaaattgtcaccccagccttgcaacaactgccctgatcagtcagcaaccatcaatatcaaggcacgaccctccaccagcaaaaagattatgactcgcagaaggctcagagagatggttagcattttctagcaataaagtatttttacttatttttttaatcatgccatattattttaaattacatacgaagatctaacatgtcacccacagaccatttcatccactgctctgtttggctgcagtctcttgtctctcccttcagcaatggtgaagcggataccctttcctcggggaagagaaatacatggtttgttgcccttgtcaataacaaaaatgatggaaaagctgttgctgttggcatctttcacgtgaatcgtgtcaaaagatccagggtgcctctctctattggtgatcacaccaattcttccccagttagcacctccagtcaccaaacacaggttaccagtgtcgaacttcaaagcagtgatgttgccagtctccaaatcaatctgaatggtgtcgttcactttaatgagggaatcagggtggcggatagtgtgagcatcgtgaatcaccaggtgaggggttccttttgtgcacacaaagatttttctcattttgcataacttgtacttgacttcctcaggtgtaacacgatgtacagcaaagcgacaattgatgccatagatcagacggaaaccctctcccgtcttgtcaatgctgatgacatccataaatccagtagggtaggttatatcagttcgaaccttgccatctaccttaatgaaccactgcatgcaaatcttcttcacttcatctcctgtcagggcatatttaagtctgttcctcaggaaaatatgagggagacactctctcagcttttggggaccagtggatggacgagcagcaaacacaccagtcaatttatccagcatccaacgttgtggagctgctacccgcttcagatgctgcttgggaccggaagccacagctgtaataggcacagaaagaggacctcccatcttctatgcacatagaaactgggaaccaataaagtatttttacattaaggtatgtaggccaggtgtggtgcctcacgcctgtaaccccagcactttgggaggccaagacgggtggattacttgaggccaggagtttgaaaccagcctggccaacaaggcgaaaccccatctctactaaaaatacaaaaattagccgggcatggtggtgcacgcctgtagtcccagctacccgggaggctgagggtggaaaattgcttgaatctgggaggcggaggttgcagtgagccaaaatcacaccactgccttccagcctgggcaacagagagagactccatcacaaaaaaaaaaaaaaaaagaataaacatatgaaagaaagtttagctattgtattagtctattctcatactgttataaagaaatacctgagactgggtaatttataaagaaaagaggtttaattggctcacagttctgcaggctgtacaggaagcatagcagcctctgcttctggggaggcctcaggaagcttccagtcatggcagaaggcaaagggggatggaggcatctcacatcgtggcaacaggagcaagagggaggtgggggaggtgccacacactttaaacaacaaaatctctccagaactcactatcatgaggacagtaccaagaggaaacccatccacatgagccaatcacctcctaccaaggccccacctcgaacactcgtgattacaattcaacatgagatttgggtggtgacacagatccaaaccatatcagctatagtaataataaaattgcaaattcaaataacttgattcaagtcttgcaatgcccccttctcaattaggcttaccttggtttctctaattaaaactgcaacccttggccaggcacaggggctcacacctgtaaccccagcacttgggtaggccaaggcaggaggatcacttgaacccaggagttcgagaccagcctgggcaacatggtgaaaccctgtctctacaaaaaaaatacgtctgggcttggtgtcatgggcctgtagtcccagctacttaggaggctgaggcaggaggatcacttgagcctgggagatgaaggttgcagtgagctgagatcatgccactgcactccagcctaggtgacagagcaagaccctttctcaaaaaataaaaataaaaatgaaaactgcaatccttggccaggtgtagtgtctcacaccgttaaccccagcattttgggtggctgaggcaggaagactgcttgagcctaggagttagagaccagcctgggcaacacagggagatgtcacctctacaataaatttaaaattaaaaaactacaatcttctccactccctactcctttaacttgctctgttttttttttaactatagcactttttgctttctaaaatgctaaaggatttacttatttataacatttatcatgtatgtacatgtcctccactcaaatataagtttcatgagatcagaggttgtttttttcaataatctatcccaagcactgagaatatgcctagtacatggttagtaatcaatatctatgtgttgaatgaatgcagcagattgacaaaataataatacccacggtaggcaagagtgtgaatagtcagactcatgtactgttaacaagagagtaaactgattaaatgaactatatacattcatactcgaacatactaaacaaccattgaaagtgatattgtgcagtgtggcaaaatacaattacactctgttccccaggctggagtgcagtggcgcaatcactgccccccaccgtctggacctcctgggctcaagtgatcctcccacatcagcctcctgaatagctgggactacaggagcaagccaccatgcattgttaatttctttttttttttttcattttgtagagatggggcctcactaggttgcccaggctggtcttgaatttagaactttttagtaaagttcccatcacattatcatgggaataatacaaattataaaatagcatgtacaatctgtttccaaggaaaaagtgtgtacaacaaaatcttatctatgaggtgagattacaagttgttgtttttgttgctgttgtaagacagaggctcgctctgtcgctcaggccagaatacagtggcaccatcctagctcactacagcctcgaattcctgggctcaagcaatcctcctgcctcagcctcctgaggagctggaactacaggtgtgcgccactgtgcccagctaatttttttttattttttgtagagacagggtcttgctatgttgcccaggctggtcccaaactcctgggctcaagcaatcctcccacctcagcttcccaaagtgccgggtttacaggtgtgagccactgcatctgccctgccacatttattttctacaatgaatatgtgttagatgtatagcaagcaagggaaacattttttaaaaggagaaaatagaaactacccggttaatacgcataggctttcctgttttaacaaggatatcggaagagtaagaacatattttagaagattcactctgcagttacattaaatggaaaccagcaagcaaagagaaatgggtaaccaaatgtaggctatttaaatgtcctctctattgtctgtagtttttaaactgcaaaaagtaaaagtgtgtatgaaataaattgtatgaaagtttctggatttaaaaagcccattctcttctcaggaagacccggatatccttctggaaagaaattcacgaattctgaccatccttgaagccaaactcaagcccgctggcctcacacgaatctgcctgttactccttaataagacaggacttcctttgggcttgggctgggatcaaatggtgctgtgtgaaagccacccattcctgccaatcacacaacccctgtaaacagcacggcttattgtgaaaattaattcagggagcttaaactccaccgaacagaagggtttaaaaagaaaagaaaaaaaattcccgtggtttagaaaatactagatgcattatgaccttcggtatgagtcccaggctatgtgcattataccggcaacacccgggaaaacataagctgtcttttttaatccatcagataattacaccgactacaaggacattttggcaactactagaaaatactgccctctggtgttaaggtcattccacactgattaacacaacaaaaaggaaaaaaagaaaagcctttcttaaatacaaaaaccactaccttcagggacttatgtttttgacttgcaaaaaatctgaacacaaaatcccaaaggattttacgggtatatattgtggacaccttccccactgtgcccggaaaatacctactaatgttattacaagctgtctcagtcaattcatgtcagaggatctcctctccaagagctatattcagctgtctcttgaacaaaacaaaaccaaaaagtattttcaagagcttctgtgggggagaagtttctggaaaataaactaaagattattttcacagaaaattttctactaatcctggtaggaagaatagaaagaagagcaatattacgatattttatatattatagaagtctttaaaaatgtgagacaatttttatgaaaaacaaaatagccacattaataaagaagctggcaatcattggctttatattgatcatcttattcctgcttaaaggtacttcaagaataagatagaaaggaggttctgtcgtagctctccgctataagaaaataaaactttaaaagggtggggcgtgccgttctgatggttacacacacaagaattgcatgcacaaattcagcagtcttggctgggcatggtggttcacacttgtaatctcagcgctttcaagccaaagccaccatgcccagcctttttttttttttttttttttcagatgggatctcattccgtttcccaggctggaacgcagtggcgcaatcttggctcactgaaacctccacctcctgggctcaagcgattctcccacttcagtctccctagtagctgggactacaggtgcccaccaccattcctagctaattgttttttgtatttttggtagagatggggtttcaccatgttgcccagactagtctcgaactcctgagctcaagtgatctgcccgccttggcctcccaaagtgttgggattacaggcgtgaagccaccatgcccagcccatgatcttttgtagagatggagcctcaccgtgttgccaataaaagaaaccaaagttccatggagaaatgaccgattctaagactggggcaggaaatacacaggataagccaggagcacctactagtaccagaaagtaggaaagtgctcaaaacaaacaaaccaaaaaaaagcccacatcagtggggagacgtcaaagggtcacaggatccaactgaaagagatcccaatagtcaaaactggaacaacttgagtaacaaaataaaatagattggatcataacccaaagcatggaataaacacccatgagtccacactgatattaatgattgaataaataaatgcagttctccttccgcatccactgcaaattggttccgggacccccatagataccaaaatccatggatgctcaagtcctttatataaaatggtatcgtatttgcacataaccaggacacatccctctgtacactctaattatatttagattacttataatacctaatacaatagaaatgctaggtaaatagctgttctgtgttgcttgttttatttggtttttgttttggtttggtttggttttggtttttttgtttttttgttttttgttttttgtttttgagatggagtttcgctcttgtcacccaggctggagtacagtggtgccgtcttggctcactgcaacctctgcctcctgggtttaagcgattctccagcctcagcctcctgagtagttgggatttcaggcacccaccaccacgcctggctaattttatatttttagtagagatggggtttcaccatgttggccaggctggtctcaaactcctgaccccaggtgatccacccgcctcgaccttccaaagtgctgggattacaggcgtgagccagtgtccccggccagtttgtatgaatttttactgggtttctttccctaatattttttatctgtggttggctgaatccacgatgtgggatcagagaatacagagggctgagtgtagaagggggagaagagacacgtcttccatgcggaagaagttcaatgaattctcacagatactccacccccacagaggtggagcataactcctcactcctgaagtgtggcctgcatgtagtgacttccttccaaaaatgggagaagagtaactttacagtagagaaacctgaccaacactatctctggcaggtgattaaggtcaatgccaacagtgataagtcatattgatagtacggtcatgcactacatcatgacatgagttatatcattataatcatggtgagttgtataattacttcatcatatattacaatgtaatcataatagaaataaacagcacaataaatataaagtgcttgaatcatccccaaaccatccctcaacccccaccctagtccatagaaaaattgtcttctggtccagcgtggctcacacctgttatcccagtactttgggaggccaaggtgggtggatcacttgaggccaggagttcaagaccagcctggccaatatggcgaaacccctcctctattaaaaatacaaaaattagctggacatagtggcgcacacctgttatcccagctgctcgggagtctgaggcacaagaattacttgaacctgggaggcagaggttacagtgagccaagatctgccactgcactccagcccgggtgacagagtgacactctgtctcaaaaaaaaatagaaagaaagaaaaatcatcttcaatgaaaccggtccctggtaccaaaaaggttggggacttctgtgttaagggatctgcttcattgaaagcgatgaaactaacaaaaattcatggaagttctctatcagatgcagagaaacttctaatgacctggattgaagaccaaacacagacacatatccctctcagcaccgtgacaatcaccaccaaagcaatgtcggtttgcaaggttgaaagcaaaggctggacctgactgtggtgttgaatttactgctctgggtatttcaaatgattcaagaatccttactccttacataaagtgcaagttagtggtgagtctgtgggtgctgttgtgaaggcagcagaagaatttttggaaactctggatgagctgattgtggaggaaaattacttgtcacagcaaatcttcaatatgaatgaaacctccccattctggaaacgaatgcctgaaagaactttcattcataaggaagccaagtcaatgtcaggtttgaagacttttaaggacagagcaagtcttgcctggcaacaatgttgcagattacaaactgaaaccctttatgaggaccccagggccttcaagcctgtcaattagcacacacagccagtgcactgcaggagcaataagaagccacagatgacccagctcctcttccaagaggccctcctgaattactctgccagtgagatggagaagtactgtttggagaataatatatctttcaagattggcttattgataatgctcttcttcttcttttttttttttttttgtcattttcatctcaatatcaaagtggtgtttctccctccaaataccacctctttgatccaaccaatgcatcaaggaattataacagcttttaagactattacctaaggaggacttttgcccaggctgttgctgaaactgaggaagaccctgagaagacatggatgtaattttggaaggattacaacatctattactgtgtcaagcactttgagcttgggcttggggtgatgccaccgaggaatgtatgaatggcatctggaggaagacactcaagaggtttttccatgatttcaaaggatttgccaaggatgaggaggttgcaaaagtcaacaaggctgtggttcagatggcaaacaactctaatctgggtttggctgaggatggcattgaggagctcctaaaggaatgaggagttattggaactgggacaggaacacctagctgaagaaggggcaagagcaaagggagctgctggagaaggaaaagaactctcaggaaaactcacagtgaaaaggttgacagaagcttctgcagacttcagcaaactccttaagaagtttgaaagaaggaaaagaactcccaagaaaactcacagtgaaggggttagcagaagcttctgcagacttcagcaaactccttaagaagtttgaaagaaggaaaagaactcccaagaaaactcacagtgaagagtttagcagaagcttccgcagatttcagcaaactctttaagaagtttgaaaacatggacacccaacaccaaaaggtttttattaacagacagaaatgttcatggtgcattatctgtttatagggaaatctatgttaaagaaaagaaacaaaccaagcaaaccaccatggacatatttctgaaaagagtgaccccacctcaagaagatctcaggagggtccttcaggaggtacccagaagaagacattgttatcacaggggataatgcgtgtgttactgcccctgaagaccttccaatgagacaaaatgtggaggtggaggacagtgacattgatgatcctgaccctgtgtaggcctaggctgatgtgtgtgtttgtgtcttcattcctaataaaaaagctgaaagaattttttaaatttttttaaattaaaaataaaaggccaggtatggtggctcatgcctttaatcccagcactttgggaggccgaggcaggcagatcacctgaggttggcagtttaagaccagcctgaccaacatggagaaaccctgtctctactaaaaatatgaaaaacattagccgggtatggtagagcatgcctgtaatcgtagctactcaggaggctgaggctggagaatcgcttgaacccaggagacagaggttgtggtgagccgagattgtgccattgcactccagcctgggctacaagagcaaaacaacgtctcaaaaaaaaaaaaagaaagaaagaaagaaaagagcttataggataaggatacaaagaaagacgataggccgggcatggtatttcacacctataatcctagcactttgggaggtcaaagcgggtggatcacctgaggtcaggagttcgagaccagcctggccatcatggcgaaaccccgtctgtactaaaaatacaaaagttagccaggtgtggtgccaggcacctgtaatcgcagctacccaggagtctaagacaggagaattgcttgaactcaggaggtgaaggttgcagtgagccaagattcacaccactgcactgcagcctgggtgacagagcgagactctgtcttgcaaaaaaaaaaaaagacaatatttttgtacagctgtacaatgtgttttaagtgtaattacagaagagtcaaaaagttaaaaaaataaaaagttgataaagtaaaaagttattggaagctaaggttaatttgttattgaagaaaacaatttttataaatttactgtagcataactgcagtgtttataaagtctatagtagtgtacagtaatgtcctaggccttcacattcactcaccactcactcactcactcacccagagcaacttccggtcctccactcctttgggagttcggtctcccaaagcgctgggattacaggcgtgagccactgcaaatgacagcaactccaagctccattcatgggaagtatcctatataccattttaaaaaatattctaggctgggcacggtggctcacacctgtaatcctagcactttgggaggccgagacaggtggatcacctgaggtcaggagttagagaccagcctggccaatatggtgaaaccccatctctactaaaaatacaaaaattagccaggcatgtgctgcatgcctataatctcagctaccccggaggctgaggcaggagaatcactagaacctgggaggcagaggctgcagtgaactgaaatcatgccactgcagtccagcctgggcgacacagcaagactccatctcaaaaaaagaaaaaaattctataccatatttttgctgtgccttttctatgtttagatatgtttggatacacaaatacctaccactgtgttacagttgcccatagtaaaatgctgtgccggtttgtagcttaggagcagcaggccatacatatagcctaggtgtggaataggctgtgccatctaggtttgtgtaagcacactctgtgatgctcccacaatgatgaaatcgcctaaagacacatttctcagaacgcatccccctcattaaaggatgtatgacaatatatctgcgatataatgtgacaaaaatggcactttacttttgtggtcttcctcccaaaaacccacaatcccagtctaatcatgagaaaaacatcagacaaattccagtggagggacattttgcaaaaatgtctgaccaggactcctcaaatgacaaagtcatcaaaaacagggacagtattactcaggtgtggtggccatgcctgtagtcccagctactcagaaggctgatgcaggaggatcgcttgagcccagcagttcggggctgcagtgagcgataattgtgccatgagctccagcctgggtgaccgagcaagaccttatctctaaaataaaaataacaattaaaagttaactttatttggccgggcgcggtggctcacacctgtactcccagcactttcggaggccgaggcgggcggatcacaaggtcaggagatcgagaccatcctggctaacacggtgaaaccccgtctctactaaaaatagaaaaaattagccgggcgtggtggcgggtgcctgtagtcccagctactcaggaggctgaggcaggagaatggcgtgaacccgggaggtggagcttgcaatgagcctagattgcgccactgcactccagcctgggcgacagagtgagactctgtctcaaaaaaaaaaaaagagagagagagacatctaaggacataaaatgagaatgaaagtaaagagatgggaaaagacatgccaggcaaatactcgcccacataaagctagtataacgtaagataaaataggacttcaggcagaaagatagccattacccaggcgcagtggctcatgcctgtaatcccagcactttgggagatcgaggcgggcagatcacttgaggtcaggagttcgagaccagcctaaccaatatggtgaaaccccatctctaccaaaaacacaaaaattaaccgggcctggtggtgcacacctgtagtcccagctatttgggaggctgaggcaggagaattgcttaacctgggaggcacaggttgcagtaagctgagatcacaccactgcactctagcctgggcaacagagacgctgtcacaggaaaaaaaaaaaaagccattacttaactattcaccagaaaaatatcaccttataagcatctatcgtagagcctcaaaatatataactcagatattctctttttcccaacagctttcattctgaagtaggcttccaaatgaagctcttgatgtcctcattttcccattatttacctgctttctgtcctaacctgaaccatgacattctggaaaatattccaaattttactttacataactttaagtaaaattatgaaatcatagtcactcctctgggcaaaatatatatgtgtgtgtatatcttaaaggcaattcacatggagaattatcaaggatactctatgtttagacttgaactcttgagtttgtcatttaacattagcctgaagtaaaagctcctaactcaatggttcacttgcttacaacttcctcctactccagactcaaaggctgaattagacttcctctttatcaggagctgcacaccacatagtgcttaggggttcacaaaaaaaaaaaaaacctctggcgacttcaagtccagcagggatccagcccccggtgagtgtccacacggcatcgggagggatcacctgcaagaaagagggggcttttttaaaaaacaaaaaaaggcggggcttttttttaagagactacaaaaagaaaaagggactcaggcgtaaacaaatatgtttgcagagtttatcaggaatatgccacgttacacatacatggatttatcaaggtagagcaagtttggttaattagaaggtatgaaatggtgatgaaggtagtaaaagctgctgtgggtgcagaggtgaattccctgcttccccaggcagcaaaggagtgtcaaaaacatgaagctgtcaatgacagcacttcaagatccgcccgtgctaccaattgcacatgacaatgaaattcctccttaggcctgcgggagttttctagaatgttaaaccctgaccttgcaattcctggttgcagtcatttctaatgtcaaatgaacacggttttatctttcacaggctaaccaaatgttggctggactaatgtgcattttacatattatttattttacatattacttattacttattttacatattagtgattttacatattattacttattttacatattacttatacatatgtgtatacacgcatgtatatacttatacatatatgtatacacacatgtatatacttacacatatacatatttgcatattacttattatattttacatattacttaagtaatcaccacaaatacaacatatttttgggaaaatgagtattcacaactatattttgttatgtcaaagggattttgtaagtcagaatcaattagaatgactcagtcatgtaatgcaccacatgtgtacaggtatgtttctaaaagctttaattttattttttcatttctgttatttttttgagacagggtctcattctgttacccaggctggggtgcagtggcataatcatggctcaccgcagcctccaccttcctggctcaggcgatcctcccacctcagcctccggagtagctagtactacaggtgctcgccaccacacccaactaatttttctattttttgtagagatgggttcttgccatgtaacctgggctggtctcaaactcctgagctcaagtgatctgtccaccttggcctcccaaagtgctaggattacaggcgtgagccagtttctaaaagctttaaaatggccgggctcagtggctcacacctataatcccaacactttgggaggccaaggtaggaggaacacttgagcccaggagtttgaaaacaggctaggcaacatggcaagaccctgtctctacaaaaaattaaaaagaattagatgggcatggtggtgcggacttgtggtccccactactcaggaggctgaggtgggaggatagcttgagcccaggaggtcgaggctgcagtgagctatgatcctaccactgcactccagcctaagtgacagagcaagaccctgtataaaaaaaagaaaagaaaaaagagtaatttttaaagcttggaatccttcatggtaagaaaaaactagcatttattaagtgcctactaaaaatcaagcactgttttatacgtagtgccatactttgtacttaaccctcataaccaccacacaagttatgcattatgaaaactagtttatatactgcaactcaaagaagctaagtgattttcccaaagacataacagctggcaaatgacagaattaggacttgaattcacatcttcctacaccaacgcctatattgcccagcatataacacccacccagtaaatgtttgaagaacaaatgtttaaaagccttaatttcaaaggtctatgaactggctgagtgtggtggctcatgcctgtaattctaacactttgagaggccaaggtgggcggatcaattgaggtcaggagttcaagaccagcctggccaacatggtgaaatcccgtctctactaaaaatacaaaaattagccaggctaggatgggcacggtggctcacgcctgtaatcctagcactttgggaggccgaggcgggcggatcatgaggtcaggagatggagaccatcccggctaacaaggtgaaaccccatctctactaaaaatacaaaaattagccaggcatggtggcggcgcctatagtctcagctactcaggaggctgaggcaggagaatggcttgaacccgggaggctgagcttgcagtgagccaagatcgcgccactgcactgcagcctgggcaacagaacaagactctgtctcaaaaaaaaaaattagccaggctaatttttgttgtggcgggcacctgtaatcccatctactcaggaggctgaggcaggagaatagcttgaacctggtaggcagaggtttcagtgagcagagattgtgccaccgcactccaggctgggtgacagagcaagactccatctcaaaaaaaaaaaaagtctataaaccaagactaccaaataactgccatgaattcagttagttatacataaagacaaaaaaaaatgtctaataccacacccacacatatatttagcttcaattttttttttttttaatttaagacgcggtcttgctctgctgcccagtgcagtggtacaatttcagctcactacagccttgacctcctggactcaagtgatcctcctgcctcagccctgcaagtagctgagactacaggcgcacaacactatgcctgctaattttttttattttttgtagagacaagatctcaccatgttgctcagactggtctcgaatgcctggactcaagcgatccgcccgccctcagcctcccaagtgctgggattacagggtgagccaccgcactcggcccaaatatttgtgaacacatttaaactcggtacttttaccacttgatcctgagtcatactttcagaataaaatcatacatcacgactgagagtcaatccccataaaatggctctgcgaaaggaaaacatggcccttgaattaacaagagctgtttatgaagcccaaacaagatggacaaaaaaagaggtgttgtgaaccaaagagttctcctaaacttctctcacctgtgttccctgagaataaaaaagggacaatctttttttttttttgagatggggtctcgctctgtcgcccaggctggagtgcagtggcgccatctctgctcactgcaacctccgcctcccaggttcgtgattctcctgcctcagcctcccaagcagctgggattacaggctgtgcaccaccacactcgcataacttttgtatttttagtagagatggggtttcaccatgttggccaggctggtcgtgaactcctgacctcaggtgatccgcccaccttagccttccaaagtgctgggattacaggcgtgagccaccacgcctggctccagggacaatctttttaaaacaaggaagtcacaaagaggaaaaactgatttgcccctccagaagattcacacttggaaccacagaaaggcttcacaaagaccattttccaccctccaggtgtgtaaaggtggggccacaccccaactcctccagtgtcacctttaccagccacaggtgtatttccctctccccctccctgggaacagaccctacagaaggaacttcttttcccaatgaacgaattgcagagttacagagttctgatgtttatcttcattagatactagaaacgaatgaaccatttagaataaaaccaaacgtcaacatgataccaaacggtgcatctgaacgtgtccctgacctgtgaccttagcacactgaagggtgccaaggctccaacctgctctgccccaacctgttcttctaactgccctaggtgtgtccacacgtgtggtggggtaggtgactctaagaatttcagatacttagattgcaaataatatgagataaagcataattcctcttaaataaagcaggtgctctttttaggaactcttaagttatttgagaaaaaaaaattacagttacaaagcttctaaaaaccatccccagagccataagattgtgacatcaaaaatagtggaggccaggcatggtgggctcacacctgtaattccagcactttgggaggcggaggcatgagaattgctggcatccaggaggcagaggctgccatgagccgggatcacgccactgcattccagagcgactcaggaaaaaaaaaaaaaaccaccagtggatggaaaaataactaaggccaagtgcagtggctcatgcctgtaatctcagcatttgggaaactaaggtgggggcattgcttgagctcaggagtttgagaccagtaacacagcaaaaccccgtcttcattaaaaatacaaaaaattagccaggcatggtggacatgcctctagtcccagctactcaagaggctgaggcaggaggatggcttgagcccaggaattcgaggctgcagtgagctaagatcaggccactgtactccagcacgggcaacagagtgagaccttttctcaaaaaatataaagaataaataaataaataattagggccagtattatgctgaactcatcctaaaaatatgttgttttcaggcatttacgtgatgctcagatcctctcccacattccctccactcaatatcagagcctagcttcagtcagtggagagttggagcaagaaacttacctaggggctaattaatcagcgagtcctacagagagcctgctgcgtgcaagatgctgagctgggccttcatggtggcaccacctgtgcggttctcctcctggctttcgcaaacctgtctagactcctttcctcttgcccccctgcctctgaaacacagcatctcgggctgggcacagtggctcacacctgtaatcccagcactttgggaggccaaggagggtggatcacctgaggtcaggagtttgagaccatcatggccaacatggtgaaaccctactaaaaatacaaaaattagctgggcatggcggcacgtgcctgtaatcccagctactcgggaggctgacgcaggaaaatcacttgagcacaagaggcagaggttgcagtgagctgagatcatgccactgccctccagcctgggtgacagaacaagactccgtctcaaaaaaaaaaattagcctatgtgctggcgtgcacctgtaatcccagccactgcggacgctgaggcaggagaatcgcttgaacccaggaggcagaggttgcagtgagccaagattgtgccactgcaccccagcctgagtagcagagcaaaactctgtctcaaaaaagaaaaaaaaaacatacacacacacacacacatacagagcatcttgctctctggcaccactgtcatacccaacagcctctccttcacttgtggatcagcaaaccccagctcattaaccaaggctcagagccaagacctctgtgaagccatctgtaaaggccacagtagagtggctcctcgtcctctttctccatgtgatgtggctttacaagcacagctaacttccctgtcacacggccagccccttagagaagggaggatgccttcattgccttcattaacacagagtagagttcctataatgacttactaagtcacactgagacctaacgtaaaattaaaccataaggaatcaaggcatatgggtttattgctgtacctttaaatgaaacccacagagaaaagtgaaacgatcatccagttttttaatagcagtagcatctctgaatgttgtcagaaatttttcccttgtggttatttcattacaatttaagaaactttaggagtggcatataaaatattttgcctatcttttttaatttttattttattattttcttaattttttttgtagagatgggggtttcactctgttgcccaggctgcagtgcagtggcatgatcataactcatcatagccttgaactcctggcctcaagagatccttccacttctgcctcccaagtagtgggactacaggtgcacaccactacaatcagctaattttttttggtagagacgggggcttgctctattgcccaggctcatctcaaactcctgacctcaggcaatcctcccacctcagccccctaaagcactgagattatgggtgacagccgccatgccttgcctatattttctttcttatacaatagataaaaatgaaatcaggctgggcacagtggctctcacctgtaatcctagcactttgggaggctgaggtgacaggatcacgtgagtccaggaattcaggatcagcctaggcaacatggcaaaaccccatctctgcaaaaaaaattgtaaaaatttgccaggcatggtggcacgtgcctaaagtcccagctacttgggaagctgaggtgcgaagatcatctgaacccaggaggtcaaggctgcagtgagctgtgatcatgccactgcactccagcctgagtcacaaagtaagaccctgtctcaaaaaacgaaatcaaagtctccacctcccaagccaaaccacaacccttcctgagctccccaccgtcccatctcagtggaagcccatggagcaccatccagagtccccaggtcagaagccctggagtccactctggatgctgcactagacactgcccagggcagcacacctctcctgaagtgctccctgggtttttcctctgtccccactggcctcttctcttggtctcctctgcagatttctaaggcccactccaaaggctggcttggtcctcagtccacactctctcttgcagaaaacaatgcaggtactctgcccagattgcccaggttcctgtatactatggctttacacacctttagctgtaatgtgattttggtcctaatggcagctcctgggccgcttcctttttttttttttttgagatggagtctcgctctgttgcctagggtggagtgcagtggcatgatcttggctcactgcaacctccacctcccaggttcaagcgattctcctgcctcaacctctcaactagctgggattacaggtacccaccaccacgcctggctaatttttgtatttttagtagagatgtgatttcaccatgttggccaggctggtctcgaactcagaaccttgggtgatccgccttggctttccaaagtgctgggattacagtgtgagccactgcgcctggccaacctcttctttagaggactgcctttgggttgccagagtcacaccgtccacaggcacaggagctagaagtgcctgggaggcactagccttagcccaaggttaacacgcctctgcagcaccatctacatgcacaaatgcccctgtcagatcaaactgaagcctatccactgtgggactctggcctgatagtacattctgcttggcttcctccccttccgtatctgcttaccacaatgtcttgtttaaaattaattcatagtttttcagtagagacagatgtctcactatgttgcccgggctagtcttgaactcctggcctcaagtgatcctcctgcctcagcctcccaaagtgctgggattacaggcatgagccaccacacccagcccacgacaatctcttactagtctttgctgggactagttccttaataacatcatatttgctcaaaaattattgtctcaggatctacttccaggaaactcatttggaaacaggaatgggggtgctaaggaacagattcttttttctttttttttttttttttgagatggagtctctctctgtcgcccaggctggagtgcagtggtgtgatctctgctctccacaagctccacctcccgggttcatgccattctcctgcctcagcctcccaagtagctgggactacacgcacccaccaccacgcccagctaattttttgtatttttagtcgagacacggtttcatcgtgtcagccaggatggtctcgatctcctgacctcgtgatccgcccgcctcggcctcccaaagtgctgggattacaggcgtgagccaccgcacccggccgctagggaacagattctaagatgggattttagagctggatcattccccagccaaatggcaatagagtccccattgtcagtgatgagtggattaatggcaagctgtgcaattgcttaactaataatcactagtactttcatctgtgatgaattggctgagatacaaaggaaaaggaagcactggttcacgagctatatttctagcatttgatagacgtggggaagtagctacacagactcagaaatctaatcacttgttgttcagtgctattgaagcaccgaagaaagaccatgacaggttcaggacagccaattatcaactcacagcatggtgtgaaagtcaggtggcctctatggcagcatttaatatagccattttagcatccttttgattggtgttgcatgatacatcttttcccatcgctttaaatttaacctattgatgcccacatatatatgtatatgtgtgtgtgtgtatatatatatgtgtgtgtgtgtgtgtgtatgtatatgtgtgtgtgtgtgtgtgtgtgtgtgtatatatatatatatatatttttttttttttttttgagacagagtctcactctgtcacccaggctggagtacagtggtgcagtcttggctcaccacaacctccgcctcccaggttcaagcaattctcgagtctcagcctcccgagtagctgggattacgggtatgtgccaccacgcccagctaattttgtttttgtttttgggttttttgtttgttgttgttgttgttgttttgtatttttagtagaaatggggttttgccacgttggccaagctggtctcaaactcctggcctcaagtgacccgcctgcctcagcctctcaaagtgctggattacaagcaagcaatagccacaacgcctggctgatgcccttatatttaaagtgtttcttgcaggcagtacataaggttgggtcttacttttgacctaatttgacaatctctccctgttaattggggtgtacgcagcatttccatttaatctgattactgatatggttgggtttagaagttatcatgttgctatttgttctatctgtcccatgtgttctttgttcttttgttcttcttttgttgcctgattttggattgagcattttttatgaattcgcgtatctcctttgttgacttaccagccataagtctttgttgtgtcattttagtagttgctttagggccacctaatccatggagtaagataattcatggtagaataggctaaaaagaagccccagaaattgtccttcctctgaacttgatagtacatttttaaaacaataccattagaatgacttctggaacgacagagtgaggacctccatggactcactttagagaaatgaccaaaactgatgagatttatttaaaaaaaaaaaaaaaagccaggcgcggtggctcatgcctgtaatcccagcactttgggaggccgaggcgagcagatcacctgaggtcaggagttcaagaccagcctgatcaacatggtaaaactccgaatctactaaaaatacaaaattagctgaaaatacaaaattagccaagcatggtggtacacacctgtaatcccagctacttgggagcctgaggcaagagaatcgcttgaacctgggaggcggaggttgcagtaagccaagatcgtgccattgcactccagcctgggcaataagagcaaaactctgtctcaaaaaaaacaaatgatgatttaaagtctctggaaattgtcctcatggcatgaagcaaataaagatgcatttattcaagaaaatctattaaatctcaataagaacactcagagtctgtagcatttgagtcacaactcactccttccctaacccccaactcagcatgatgaaagtcctacccctggccaggtgcagtggctcacacctgtaatcccagcactttgggaggccgaggcagatggatcatctgaggtcaggagttcgagaccagcctagccaacatggtgaaaccccatctctgccaaaaatacaaaaattagccgggcttggtggcaggcaactgtaatcccagctacacaggaggctgaggcatgagaattgcttgaacctgggaggcagagattgcagtgagccaagatcatgccacagcactccagcctgggcaacagagtgagaccctgtctcacaaaaaaaaaaaaaaaactgactgtggtgatggttgcacatatttgtcaatatactaaaaaccactgaactgtatactttaaatgactgaatcgtatgatatgtgaactatatctcaataaagatgggttgcttttttttaatctaacgaacttgatattaaaaggttaaataaggccaggcacagtggctcacacctgtaatcccaacactttgggaggcgaaggtgaaaggatcagctgaagccagaagttcgagaccagcttgggcaacatagtgaggcccccatctctacaaaataaaaaataataataaatagtaataataaataaaagattaaataagaaaacagtatcttaaccttttttttttaagtacaaaggtaattactagaacaaaaacatctaccttcaggctggctgcagtgactcacacttgtaattctagcacttcaagaggcaagggcagttggattgtttgaggaatggagtttgagaccagcctgggcaacatagcaagaccccatctctacaaaaaatttcaaaattaactaggagtggtggtacatgcctgtagtcccaactactcaggaggctgaggtgggaggatcacttgagcccaagagttcgaggctaccatgaggtatgatcataccactgcaccccagcctgggtgacacagtgagagcctgtctccaaaaaagcaaacaaacaaacaaaaaatccatcttttaaatatcctaaatatccaaatacatttagaaaataaaagaacaaagaaaatatcaaatagagaaggaaatacagaaacacatataacatatatataacacacataacaattatattataaaataatatgacacaattgagactgttaatacatatctgtgggcttaagtccactgagaggattgactagtttattaaaagacaaagattcggccaggcatggtggctcatgcctgtaaagcacttttggaggtcaaagtgggcagatcacttgaggtcagaagtttgagactagcctggccaaaatggcaaagccccatctctacaaaaaatacaaaaattagccaggcatggtggtgtgtgcctgtagtcccagctatttgggaggctgagacaagaaaatcacttgaactcgggaggcagaggttgcagtgagccgagattacgccactgcactccagcctgggcgacagagcaagactccatctcaaaaaagaaaagaaaaaaaaaaaaagacaaagatcaaagatttccagcttcactcacaaagcaaaactcagctatatgctgtatacatgattcgcacatgaatggaagtgattgcgaaaggctaaaaataaaaagatgggcaaaggcatttaacagtcaaatggagaccataagagaacagcggagtgacaagactcaatttgcactttaaggagatggctcaggtttctgcgtggaggatggattgaggggggtgttgttatataaagtggtcaaagatggcctctgtagattggccatctttgtttatttcttcaccgcagactgagacctattcgttcaaaggccgactcaaatttttatacatccagttgttctaaaaatagcccacacaaccgggcgcggtggctcacgcctgtaatcccagcacttcaggagaccaaggcgggtggatcacctgaggtcaggagttcgagaccagcctgaccaacatggtgaaactctgtctctactaaaaatacaaaaattagccaggcgtggtggcgggcacctataatcccagctactcgggaggctgaagcaggagaatcacttgaacccgggagggggaggctgcagtgcgccaagatggcaccattgcactccagcctgggcaacaagagcaaaactccatctcaataaataaataaataaagcccacacaagcagattttcagccattgcttgtgaaactccacccagcatctgctggcacggatcagatggagtctgtggttctgagacttcaagctgctctctgacctagagactcccctcagtgctgctggagggcaccacctagacatgtcaacccccctcatcagtccccctctctcctgggagtgcccttgctcttctccccttctaagtagagacccccaagctctagcctccagagagtttcttgctgagacgtgcttgctccccatggcaatgtccaagcatcacacattaagcttgttgtgctacttctactttatggttctctcttttcccttgctcaagtctcatttcccccaaatcctctacagtgggcaatcaccccaatgaaagatgaaagcagccagacaggagaggactggaccaggcatggtggttcgtgcttgtaatcccagcactttgggaagccaaggccggaggatcacttgagcccaggagttcaagaccagcctgggcaacatagggagacctcgtctacacaaaaaaaaaatacaaaaattagtctagcatggtggtgcacgcctgtagtcccagctactcagggggctgagtgggaggatcacttgagccctggaggttgaggctgcagtgagccaagatcacaccactgtactccagcctgcagtctgggtgacagagtaagatcctgtctcaaaaaaaaagaaaaagaaagagagatacactttgtatcatgtcccaatgtatgtatgcatgtatgtgtcacacacatacatatacatccatgaaaccatacttgccttcactttgccatgtatttttatttgcattttctatgtgtttcttttttatttttaagagatgggggtctcactatgttgcccaggctagagtgcagtggctattcccaggtgttgtcattgtgcactacagcctggaattcccgggctcaagcagtcctcctgcctcatcctcctaacctggagctacaggcgcaccaccatcctttttttaaattttattttcaaatagttgctagtcatgagcctttaaattaacttcatgatccactaacaggcgacatcctgcagtttggaaaaccctgcatttcaccatgattgcttatgtttctgctccttaaatatgtccttggatttatgatgaaaatgggggaaaaaaagtgattttttttttcatgagttacctctcttttctccatgttccctctggtttttctaggaagcccacactttgcattgctggttttcaataatagtgaactaaaggaatccgagaacttctagacacaataggcctaagccaaaggaaaaagagagtccctgaagcaagtgttttctcctggccgtaagaagtactcacagccaggcatggtggctcacacctataatcccagcactttggaaggccagggcaggaggattgcttgagcccaggagttcgagaacagctgggcaatatagggaaaccgcatctctataaaaaaatacaacaatgaggtgtgatggcacatgcctgcagtcccagtacttggaagactgaggcaggacaatcaattgagcccaggaagtcgaggctgcagtgagctatgattgcaccactgcactctggcctgggcaatgaagtgagaccctgtctcaaaaaaaaaagaagaagggggagggggaggggagaggaggaggaagaggagaaggacaagggggaggaggaggaagaggaggaggaggaataggaggagaaagaggagaaggaggaggaggagaaggataagcagaaggagaaagagaaggaggagaaggagaaggagaagaaagaagacagaagaagctcacagccctctggatacctgcagttaaaggaggcagcctgtgtacaactgagcccccagccacttactcattactgtctgtgtgactccttgccgaatacatgcacactctctggggtgtctttgtaagtggaatttaggaacaagagaatttgctaaaatgggaaatttgagataccttcctatattcttttggtgtataaagtagcacagaaaaggaaatatacataagaacttcatcaaagttctttagtgaataaagatgagaatctcattattaaattaattaacattattaccaagaacagaataaacaagaatccagatgctggaaatgttccctttccttttatttagaataaaaatattacatagaaaaagaatattctgtatataaatacaatagaacaagtgacctacagtttgacttctccacagcctagagtacccacagagtcatttttttgaacacaatgtatcttatgaataagcctctacacttttaaaattgagtttttctctttttgaagtacagcttcaagcaactacaagtttccatcctgctaaccccaggcagcagttgcttttaacttctatcttttatttaaaaaacttaattggaagtttttgtagccagaaggagcacttcaaagaaagaaaaaaaaattaccaaaaattaatactttatgtcagaggttagtagggaaagaaacaaagattacagaaaaagaagagttaatggtatctaacaaagcagtgaaagaagaaaagaggcagaaaacgaactgaaggaagaagtgaaaagggaaacttgtaacattaaaaacagaaaatgtggagtaacattttccttactccaaacaggatgagacaacacaaacgttacagcagcatttataatttcctgcacagccaaaaagctctgtgtacaaatcctcccgcccctgctcaagtcttttactcctgtctacaattacacatcaagggaccacagcacttcctgcactttaatttccagacactcctgtcactgtcaattctaaatcaactctgacaaaacagtattaaaacttcaggcatgatttagtattctgcctttgaggcgagtgcagaggaagaaggccctggattgagagggtcaagagatgagggtctttgtcccagctctgccatcagtttacgtgacactttaagcaggtccctttccctctctagagttcagtgatgtcattgtacaggaagagggttggagattcctggggttccttccagctctgataaactgtggcactatgatcctagcgtattagtgatcttagtgaatctcccataacactcgccaaagatactgccaacagggaaattagatgactatccaagactcgctccagaagttcatagagtcagagtcaataatagatcctactatttcaaatgggaaaaatttcctatgcttggctgatgacaatcaaattgaaaacaagtccccaatatcagaatagctatgaaataagactaaagacttcactgttctcagacaggcaagacttttcttacataaaaaatcataacatagtgttgatagatcagaagaatgattatagtttacagtaatctattgcatatttatttcaaaatagctagacgagaataatttcaatgtttctagcgtaaagaaaaggcaaatatttaaggtggtagatatatcaattgcactgatttgatctgagctatgattgcaccactgcactccagcctgagtgacagagcaagaccttgtctcaaaaatagatgggtacataaataaataatcacctctacgccaaaagtatgtatacatattacataccaataaaaataaaatattaaaaaatcataacagcctgtctctacaaaacatttaaaaattatccaggcttggtggtacgcacctatagtcccagctactcaggaagccgagttgggaggattgcttgagcccacgaggtcaagactgcagtgagctattattgtgctactgagctccaacctgggtgacagagcgagaccctgtctcataaaacaaaacaaggctgggcacggcggttcacgtttgtaattccagcactttgggaggcccaggtgagcggatcacttgaggccacaagtttgagaccagcctggccaacatgccgaaacactgtctctactaaaaacacaaaattagcccagcgtggtggcgggaagcctgtaataccagctactagggaggctgaggcaggagaatcgcttgaacccaggaggcggaggttgcagtgagccaatattgcaccactgcactccagcctgagcaacagagcaagattttgtcgaaataagaaagaaagcaagaaagaaagaaagaaaatttgaacaataaacttgatttaatgaaccaataactaaaaaacagactatatactcttttcagtcacatggagcatttacaaaaactggccattcaaaaggttaaggcaaatgttttttaaaaagttaaaaacaaatgttaaacattccaaagcgtacaggccttaatctctatcaacatgtaattaagttaggattcaatcataaaaatatatttttttcaaatctgtatgtttggaaatttaaaaacatttcagaaatacaccgaggtcagagaaaaaaatatcagggaaattaaaaagtgcttataaaggaaaacattaaacataacataccaaaactagcaggataattctactcccatttagaatgtaggaggttacaagacaatgtttccccactctaacaacaagaaaaagatggttaaccgctaatcacggtctttccaagtacatcagagagctgagaatgcataaaacctaatgaaaagaacccaaaaactgacaagcatggttgccttcccttggtcgtgcagcagggggcagaggatctcgctgcagatgggtaagaagggtgaacttttaatgaatttctagagatgaaatgaaggtttgagtgatggtttagaatccctaacagccccatacacacagactctgtgctcatagccaactctactccatggatctttaccaaatgtatgtgaaaaaaactggagacagaacaggagaactgttgagagaccctctctgagcacatgtgtggagcctctgggcctgcggaacaataaaagaaatgactagcgtctgtgtgactggggtaccagaggaaagaagaaagagaaggagtcaaaataagtattagaagaaataatggctaaaacttttccaatttggctaatttttagaattttttgtagagacaaggtctcactgtattgcccgggctggtctcaaactcttgacctcaagaaatccttccagagataaactcacagattcaagaaactcagtgaagcacagtagaataaacacaaagaaaaatacccctatgtatatcatggcactagtgaaaccaagaataatgagaaaatcttgaaaatagagaaaacgtagagcaataattaaaattaccagccacttctcatcagaaagtatgaaggcagaagacagggaaataacatctttgaaatgctaaaagaaaaaagaaacgaccaaccaatagttcagtatacagagtaaatatccttaaaacatgaactcaaaataagggcattttcaaataatataggttgatgatagaacaaaaggaaaagctataactatcaagtttctagaagaaacacagaatgtcttggaaaacttgggataggcaaagattattttaaaggaaattgaaaacactaaattttaaaagcttatgacaaaccgggtatcattaaaactaataacttgggctcttaaaaagataccattaaaagaaagaaaaagcaagccatagaccagaagaaaatattcaacacacatgtcttgtatttagaacaaagaacttatatcgggaagtgaaaataaaagaactcttacaaatcaataataataaacaatccaactgaaaaaaaaatgagcaaaagacactgtaagaagctgtatggatagccaacaagcacattaaaagttgctcaaatttaaggaaacgcaacacaaaaccactgtgaaataccactactcccccattcgaatggctaaagtaaaaagcattgacaagccaggcgctatggctcacgcctgtaatcccagcactttgggagaccgaggagggcggatcacctgaggccaggagttcaagaccagcctgggcaacatggtgaaaccccatctctactaaaaatacaaaagctagctgggcatggtggcgcatgcctgtagtcccagctactcaggaggccaaggcaggagaatcacttgaacctggggagttcaggttgcagtgagtcgagatcgtgccactgcactcccgcctgggtgacagagtgagaccctgtctcaaaaaaataaataaataagtaaagtctggaagagagagatgtgattacctggtaaagagttttccacttgacatttctcagcatataaatgggttatgggtgagtcaagatgtgacagctgaaggctgcgagagcctctagactggtcacctcaagccctgggtggccttactgaccccagtgtgccaaaacaagtggtcattttctgcatgggccatgatatgaaaaagtttaggaagtattaacataaggaacgggaatatagagaaaaggctcaaatacagaggcctggggtagctagcacgtagaggccaggaagatgaggaataaccagcaaaggagactaagaaagcatgagcagtgatgaaggtggtgagccatgacagtgtgttatcccaaagccaagggtttgcaaagagtttgaagaaaggagtgactatgtcaaatgctgtagacgggtcaagaaagagaaggtttaggctaggcatggtggctcatggctgtaatcccagcactttgggaggccaaggcgggcagatggcttgagcccaggagttcgataccagcctgggtaacatgatgaaaccctgtctctacaaaaaatttaaaaattagccaagcgtggtggcactcacctgtagtctcagctgctcggcagggctgtggtgggagtatcacttgagcctgggaggttgtggctgcagtgagccaagatcacaccactgcactttagtctgcacaacagagtgagaccctgtctcgaaagagaaagaaaagaaagaaaggaagaaagagagagagagagaaaaggaaggaaggaagggagggagtgagtgagggaaggagagagagagatgaaagaaagaaagaaagaaagaaagaaagaaagaaagaaagaaagaaagaaagaaagagaaagaaagaaagagaaagagagagaaataaagaaggaaagaaggaaagaaaagaaagaaagaaagaaagaaagaaagaaaagaaagaaagaaagaaagaaagaaagaaagaaagaaagaaagaaagaaagaaagaaagaaagggaaagaaagagaaagaaaagaaaagaaagagcgagaaagagagatggggtgcagtggctcaccctgtaatccgagcactttgggaggccaaggtaggtggattacctgaggtcgggagttggaaaccagcctgaccaacatggagaaaccctgtctctactaaaaatacaaaattagctgggtgtggtggggcatgcctgcaatctcagctactcaggaggctgaagcaggagaatcgcttgaacccgggaggtggagattgcagtgagccgagatcgtgccattgcactgcagcctgggcaacaagaatgaaactccatctcaaaaaaaaaagagagagaaaaagagagagagagaaagaaagaaaaggtctgagaaatgaccaccgaatttagcaaatcagagtcattggtgaccttgacataagttacttcagtagaggacaaggcagggttgaaaacctgaccacatgcattcaagaaagaatatgatcactttttcaaggagttttgctataaagtggaggagagaaataaagtcatccctagagaaggttatagaataatgaagttctttgaatcttaagatgggtgacatagcaaacgtacatccgacgggaatgttccagtggatggggaaaatgtgatgagacagaaaagggaaaatctgctggagagtgttcttaagaaggcacaagaagataggatgtaatgcacaaaacaaaaggtttgccttagaagtatacccggaataacagaagagaaggcaaagtatatatggagagacacatagaacatcgtgcagatgtgatggaacatatgcaagttctctttcattgttgaaagtgagagtaagagagaagatatttgaagtttcaggaaaaataagttgttaaggagtcatctaaaataatctattgcttttgttactaagtaatcaatgggctggctgcccaatgcacatagaggctaatagcatggcactggcttttgaaaaaagaaatatttttttgtgaattgactggcaaggagacaggaggaaacactcaaatctgtctccctgagctgggatttggatcaggttttataagcataggataatgaagtatgatctgattggatcttgcagtgaggtgattgccaggaggcatgatctaactggatcctgccaagaggtaacatcagagcttgatctgattggatcctggatgccaccacgtggtgtctgctttttaattcagtcccctctcctcagtccaagcacttaggatccccctaccctgactgttcatctgggcatgctcaagttacatgacctttgacctgggggtccatggcaactgaaaaacaactcacaactttgttacataaaagttgagccagattgatctggtgcaattacactttcttccctcaacaatcaatccagggaaacagccattttaagaacctgctactcagtacatatacatctaatgaaaagggttcttatgagcatatgtattatatttaagctatatatttaatcttcaccatgagaaaacacaaatgataaacataccttatctcaagtaattacaccatattccccactacctctgctctcgaatgcacagtttagcagttatttgcgctaaaattatccttctacacatcaaatccactaaaggagctagtctcttttaaagaaatgaacctaataatctgtatgaataaaaccatgtcccaaattctctataaagtatattaagagcagaactatgatttaatgccaagtaaattttaaatattacaccttaaaatgcatcatgttcacataaacaattatataacagactggaaattcaggagctaataatgcagttttcagcaacaaaatcaaagttcatttcctccacagcacccctgtctctacagcccactcatatactatgtatgaacagcttccatatatatgatgtttctcagtgggttttctccaacctgggcagcagagcaaaaccctgtctcaaaaaaaaaaaaaaaaagaaaaaggaaagaaagaaaaatggccaggcacagtggctcacacctgtaatcccagcactttgggaggctaaggctggtggatcacctgaggtcagagttcaagaccagcctggccaatatggcgaaatgctgtctctactaaaaatacaaaaattagccaggtgtggtggtgtgctcctgtaatcccagctactcaggaggctgaggcacgaaaatcacttgaacccaggaagcagaggttgcggtgagccaaggttgcaccagtgcactccagcctaagcaacaaaagcgaaactccatctcaagaaaagaaaaagaaaaagaaatgtcattttcattgagcattggatcaatttagaagttgatattcatagaataataaccacatcacactatctttctaaaattccaacacagaataataagaccaattactgggtatgctcagcctgtgggggccaagagggcagatattctctgcatctatcccacttggagagtccagagaagcagaggatgttttccagggaggctgctgagatgtagggcccacccaggaaagtctgagggctatcctgggaaaaggataaggataaggataactcattttttcaaaaaagcaagtgggagaggcattagatttaaagtatttgccaaatacaaagcaatttcaaagccttaaaaaattctacaagatattcattcaacaaatattgataggccaggtgtggtggctcatgcctgtaatcccagcactttgggaggccgaggcgggcagatcacctgaggtcaggagtttgagaccagcctgaccaacatggtgaaactcatctctactaaaaacacaaaaaaattatctgggcatggtggtgcacacctgtaatcccagctacttgggaggctgagacagaataatcacttgaatccgggaggcagaggttgcagtgagctgagatcgagccattgcactccagcctgggcaataaaaataaaaatacagctaatggtgtttctttctcggtggcggaattcagggaggattatatattttctaaattttatcactgcagttttctgcattgtttgagctctttaaaatgaacaaaacggcttgttttcacacatccaaatgccgagccgccaacacacctaggatgccccatggaagctgaagccacacttcccacatggcccctctggccagccgggcatctcagatgacagctgcatacaggccagcacctgcagctcagccgccaacagtggcatccacctctgcagttggctctcctgctgctgctccccagcagccaggtctgagggcccagatggcaaccactgcagctgacgtggctgtgggctctgctgtggggcacacactgggccacgccgtcaccgggggcttcagtggaggaagtaatgctgagcctgtaaggcctgacatcacttaccagtagcctcagggaatccagtcggcacagcagcagcggccttgcttctatgagaccagtttttggaggatgcacagaaccagggtgacagaaagctctgtgagggtttcagtgaggtgctgaaacagtgcagaccttcaaacagattggcctaatcaagaaggtcaaattggagtaatgaaaaatcagctctcataaccaagttaatttagtataaaaatataattgatagtgaaggtataaagtgtaaccatcagttaaacctctccttgtcattcatagcttccttgcttcagaattgaaatgaaagaaggtgctcttactgtgcagaatttcattaaggtcgtgtagaatttggggctgggcaaatgtttgtgtagcctccttaaactagctgtgattttattctctgtgagttaattaaaataaagtgattttcttccaaaaataaaaatgaaaatgaaatgaatgaaatgaaaaatgtaatatcattgtcatcaaaccaacactgatttttctttaaaaaaaaaaaaaaagatttaaattaaatatgcaaaaatgttcactgctggctgggtgaggtgactcatgccagtaatcccagcactttgggtggccaaaggggtggatcacctgaggtcaggagttcgagaccagcctggtcaaaacggcaaaagcctgtctctactaaaaatacaaaaaattagccaggagtggtggcgggtgcctgtaatcgcagctacttgagagcctgagaaaggagaattgcttaaacccgggaggcggaggttgcagttaggagagatcatgccattgcactccaacctgggtgacagagagagactctgtctcaaaaaaaaaaaaagttagcagtgattgattctcagtgataggaatgtggatgattgttgttttcttttcttttcttttctttttgagacagagtctcactctgtcaccagactagagtgcattggtgggatctcagctcactgcatcctccgcctcccgggttcaagcaattttcctgcctcagcctcccaagtagctaggactataggcaggtgccaccaagcccggctaatttttctatttttagtaaagacagggtttcactatgttggccaggctggtctcaaactcctgacctcactattgtcctgcctcaccctcccaaagcgctgggattataggtgtgagccaccgcacccggccaaaaaaaattttttttaaccacaaaaaggaaaacacttgaagttgggctataaaggaaagacttcagggaagacggaagatgaatttgaataaggccgtgaaaaatgaataggattcataaaagcacaaagaatgagaaagttcgcgaaagctcaagtaaactagttttgctgacgagactatggtttagtgaataattagaaggaagcctcaatacagaatgaggtcaactcagggaggaccattaatgccaggatgagaagtctgagatttattttatgggcaatgagagccacttaaacgtttaatgcaggtctttcacatgatcagtgtggtattttaggaagaccacactggcatagcataagcccagatgtggggaggctgtcactaaacccctcagtctccctctaggatgccttttttaaaaataaaaaataataacatgagctttgggaacagagttaccctccaacaatagttgctggatgaacatctccatgacattcactgctgcacattccttgtttaattggaagagaccacagatgaccaaatcataggctgacacattcaagccctgccttgtgataaaactaaataagacagggcttacccagggtaaccacaggacaagggggaggaaccttccactctgctccccaagggtaaccactgaacaagcaggaggaaacttccactctgctccccgtttcctacatccagacaaaatgccagcatccctagtccacttcattttgttctagtcaagtccattttttttttttgagatgaagtctcattctgttgcccaggctggagtgcagtggcacgatctcggctcactgcaagctctgcctcccgagttcacgccattctcctgcctcagcctcccgagtagctgggactacaggcgcccgccaccacccccggctaattttttgtatttttagtagagatggggtttcactgtgttagccaggatggtctcgatctcctgacctcgtgatccacctgccttggcctcccaaagtgctgggattacaggcttgagccactgcgcctggcccttttttttttttttttaagagagagagagacaaggtctgactctgttgcccagactggagtacagtggcgagatcttagctcactgccagcctctacctcctgggcgcaagcaatcctccagcctcatcctcctgagtagctgtctccctagtagtgtaccaccatgccctgctaattttttaattttctaatagagatattgcccaggctggtctcgaactcctgggtttaagcaatcctcccacctcagtctctgtaatcccagagtgctgggattacaggcatgagccacagcatccagcctaatttgttaaattttttatgagctctgcgagcataatgtaaagatcccaatgctggtcctcatcctctccatgtacctgccattggtgttcatgctattaggtcttaggacttttgggcttcctacccttttgctttgcctctctttggctgtgatagcaatggtcatctctgcagattggacaaaaccaattgtattagtccgttctcacgctgctatgaagaaatacccaagactaggtaatttataaagaaacgaggtttaattgactcacagttctgcatggctgaggaagcctcaggaaacttacaatcatggaggaaggtgcttcttcatagggctgcaggagagagaatgagagcaagcaggggaaatgccagttgcttataaaaccatcagatcggctgggcatggtggctcatgcctgtaatcccagcactttgggaggccgaggtgggcagatcacgaggtcaagagatcaagaccatcctggccaacatggtgaaaccccgtctctactaaaaatacaaaaattagttgggcatggtggcacgcgcctgtaggtccagctacttgggaggctgaggcaggagaattgcttggacccgggaggcggaggttgcagtgagccaagattgtgccactgcactccagcctggcgacagagcaagactccgtctccaaaaaaaaaaaaaaaatcagaccctgtgagattcactcattttcacaagaacagtatgggagaaaccatccccatgatccaattacctccacctggtcccgcctttgacatgtgggtgggacctttacaattcagtgtgagatttgggtggggacacagggccaaaccatatcaccagttattggcattggcatcttggcctgtactctttaccttttagggctttttgtcctggagcagatgccacagaaagactactgaaatgcttatttctacccctcaaaacactataaacacaggggtgaggctgtgcaggctcttctgttctccaccaaagtgttctacacttcatcatcttgggaaagaagcttaattcacacaggctctcattctgtgcttggcataaagtatacccagcagcagaaaaccaggaggttaacactcagtctcagacttctcttcgttttgttaaacactctaaaaaatgtaacagggcatgctatgtcttcctgatcaaatattatcaatatctcctaatatcccaaataaaatcttttggaaggaaagaaactaatatttgtaaggggtatcttgtgtgccagactttcttctaagcagtttccatacattgtttatttaatctccaaaacaacccttttagttgggtatttttgtttgttggttggtttttgtttgagacaggctctcactctgtcacccaggctggaatgtaatgatgtcatcatagctcactgtagcctcaacctcccaacctccccagcccaagtcatccttccagctcagcctcccaagcagctggaatgacaggcaccaaccaccacatcaggctaattttttaattttatgtagagatattgcccagagtggtctcagactcctaggctcaagtgatcctcccacctcagcctcccagagtgctaggattacaggcatggcactggcctccaatctgattatttcgataaaagtaatactgtggaaagccgactagcagtagctgctaaaattaaacatatacataccttacgacccagaaattttacttctgccagggcctagtggtgcattcctgtaattctagcactttgggaggctggggtgggaggatctcttgagcccaggagccggaggctacattttgagctatgatcacaccactgcactctagcctgggcagcagagcaagactctgtctcaaaaacaatttttttttaatgtaaaaagagtgtgaaatctttgggatttcctcatgcactcatatattacattttatggggttcacacaaactaaacttggtagtagtacaattatttgataagaatatattttagctccctctccctctccctctttccacggtctccctctggactgtgctgctgccatctcggctcactgcaacctccctgcctgattctcttgcctcagcctgccgagtgcctgcgattgcaggcgcgcgccgccacgcctgacgggttttcgtatttttttggtggagacggggtttcgctgtgttggccgggctgatctccagctcctaaccgcgagtgatctgccagcctcggcctcccgaggtgccgggattgcagacggagtctcgttaactcagtgctcaatggtgcccaggctggagtgcagtggcgtgatctcggctacaacctccacctcccagccgcctgccttggccccccaaagtgccgagattgcagcctctgcccggcggctaccccgtctgggaagtgaggtgcgtctctgcctggccgcccatcgtctgggatgtgaggagcccctctgcctggctgcccagtctggaaagtgaagagcgtctctgcccggccgccatcccacctaggaagtgaggagcgcctcttcctggccaccatcccatctaggaagtgaggggcgtctctgcccggccgcccatcgtctgagatgtggggagcgcctctgccccgccaccccgtctgggaggtgaggagcgtctctgcccggccgccccgtctgagaagtgaggagaccctccgcctggcaaccgccccatctgagaagtgaggagcccctccgcccggctgccaccccgtctgggaagtgaggagcgtctccgcccggcagccaccccgtccggaagggaggtgggggggtcagccccccgcccggccagccaccccgtccgggaggtgaggggcgcctctgcccggccgcccctactgggaagtgaggagcccctctgcccagccagccgccccgtccgggagggaggtgggggggtcagccccccgcccggccagccgccacgtccgggagggaggtgggggggtcagcccccgccaggcgagacgccccgtcagggagggaggtggggggtcagccccctgcccggccagccgccccgtctgggaggtgaggggcgcctctgcccggcagcccctactgggaagtgaggagcccctctgcccggccagccgccccgtccgggagggaggtgggggggtcagccccccacccggccagccgccccgtccgggagggaggtgggggagtcagccccccgcccggccagccgccccgtccgggaggtgaggggcgcctctgcccggctgcccctactgggaagtgaggagcccctctgcccggccaccaccccgtctgggaggtgtacccaacaactcattgagaacgggccatgatgacaatggcggttttgtggaatagaaaagggggaaaggtgaggaaaagattgagaaatcggatggttgccgtgtctgtgtagaaagaagtagacatgggagacttttcattttgttctgtactaagaaaaattcttctgccttgggatcctgttgatctatgaccttacccccaaccctgtgctctctgaaacatgtgctgtgtccactcagggttaaatggattaagggcggtgcaagatgtactttgttaaacagatgcttgaaggcagcatgctcgttaagagtcatcaccattccctaatctcaagtacccagggacacacacactctgcctaggaaaaccagagacctttgttcacttgtttatctgctgaccttccctccactattgtcctatgaccctgccaaatccccctctgcgagaaacacccaagaatgatcaataaaaataaataaataaaaaataaataaataaataaaaaagaatatattttattggctgggcacggtggctcgcacctgtaatctcagcactttgggaggctgaagcgggcggatcacctgaggtcaggagttcgagaccagcctggccaacatgatgaaaccccatctctgctaaaaatacaaaattatctgggagtggtggcgtgcgcctgtaatcccagctacttgggaggctgaggcaggagaatcgcttgaacacgggaggcggaggttgagccgagatcgcgccactgcactccagcctaggcaacaagagtgaaactctgtctaaaaatatatttttttaaatttgttttgtatcaagaaaaaaatacgaaaacataactttattgtagcaatctaatgcaggtgtcttttaaaactatcttttatttccagatgggacttgggaatttctttgttttattttttaaatacattatctttcacaaactcggggaggaacaactgttttttaaccaaaaactcctcacccaggaacaagcaaactgcctgagagctgcatctattttgcaatagtgcccctgaagcgcgcacgacgccgcagggtaggcgtcccgctcctgactggactcgtggcacggtcctaaatttgcagagggacccagggaggatcaacccactcgacactggcaatgtccccaccttccctagctgcaaactgaaaccagcagccgagcctcccgctctagaggcgcggcgaggggcgtggccgcggctggggtggggctaggggccgggtcgtgccccccgaaactgggccgtgccccccgcccacctcactgcgcctgcgcccgagggcgcggggcaggctgggaagtagcgttaaggtggtggttgggtgctttgcgggtcacttgttgcgctgcccgcacgtttgtcgcggctcctggatgcctctttggccgcctcgcctgttccggctctcttatctgcccagtcttcccggcccctgccccggaccctcctgcgcgcccctccggctgcctgtgtgcgaccccagcaaccggcccggggtctcgccggcgccgtcaggtcatcgtccacccggcttgttctcagcttaccgagaacgccccagcccctgcgctcctcctgtcttacttgtgttgagtcatttaatccgctttgcaattgagacattgaaacggagacgctcaggaacgtgcttcaggtcacagatccaagatgagttagggcctggaattgagtcgggctgcctgccaccattccaccttgcatgtcacacctggacgaataccctgtgcttcacctaaattcgcctaaattttcactatttctttttattttcttttctttttttttttttttcttgatacaaggtcttggtagcccaggctggagtatattggcgtgaccagagctagctcactggagctttgaactcctggggctcaagtgattctcccgcctcagactcccaaatagctgaggctacaggcgcaggccactacacccggctaattatgacatttttgtagagggggcggtctcactatgttgcacaggctggtctccaactcctgggctcaaaagatctcccacctcggcctccaaaagtgctgggattaccggcgtgagccaccgcatccggcctgttcactatttcttttttcttgactttcttctttttttttttttttcggaggcagagtctcactctgtcgcccaagctgtaatgcagtggcgcaatctcggcacactgcaacctctgcctcccggattcgagtgatcgcctcagctgggattacaggtgcctgccaccacgcctggctaatttttgtacttttaatagaaacagagttttgccataatggccagactgggcttgaactcccgacctcaagtgattcaccctcctcggcctccgtaagtgctgggattacaggtgtgagccactgcgcctggcctgtacactatttcttaatccctgccagggcggtgttatctttgcagctgagagttctaagtgacttgacaaaggacactagcgcaactttaatagcaaagcctgggccatttccaccaccacatgtgtggcctgtgttctttcccacaccttttaaaattttaaacagccttattgaagtgctggtgtaaagcctgtacatatttaaagcatacagtttgccttttacatatgtgtgtatacatccctgaaaccaccaccacaatcaagagaatgaacataaaagtttccttctgctcatttataatccttcctcccagtcacagcctaccgtatcagtccctcagataacagtgaatctgcttttggtcaccgtggattagtttgcgtcctgtagaattatatgttaaggaatcatatactatctgctttttctcagggtagaggacagttactgaggccaaggggtcacttcatgatgagcatagaggccaatactatggcatgagattttgagaaaaggaaagctttattgccagttgaccagcaaggagacaggaggccagatcaagtctatctccccatgctggccttaaggcagtacatttattaggaaggtttaggggatgagttagggatcaacaggtagaaagaaaggggaggtctggaaagtccttgggcatgcacagttgtctcttgatgggttgcatgtgcaaatccaggatgcgagagtgaatatggaacatgctgcggaagttcagactgtgatgtcagcagcctctttctgcacagactccagttggccatgttggttccaactgatttcagccagtttcgttctcttataattaaagggagtttctgcaaaatgtttcttgtcttatctgccatcatgtaagctcaagaattcctggcggggtgtggtggctcacgcctgtaatcccagcactttgggaggccgaggtggctggatcacctgaggtcaggagttcgagaccagctgaccaacatggtgaaatcccgtctctactaacaccacaaaaattagctgggcatagtggcagacgcctataatcccagctgctccggaggctgaggcaggagaatcgcttgaacccgggacaaggttgcagtgagctgagatcacaccaccgcactccagcctgggggacagagcaaaattttatctcaaaaaaaaagaattcctgttagtcacctgtttaaccctttggggtacgatttcacttcttagctctgtgcttgcaaaataattagacatcctgttatcaagaaagtatggccagataaaactggtctggaagttacacagtcaagcttaactattttgaaattcacccatgttgctgaatagatcagtagttcatttcttgtcattgctgagtagaattccattgtattgatatactgcaattttttaaatccattcctccattgttcacttttcagtttctggctataacaaacaaaacttctatcaacatgggtgtgcaagtctttgtatgaatgtacccttttatttggattaatagcagtgaaatggttgtgtcaaacagtgggtgtatgttcaactttttaagaaactgccaaactttttcagatgagatcaggtgtgtttagggtgatatggccatagacccaaactatttttcaaagtggttgttccagaccaggcatggtggctcatgcctgtaatcccagcaccttgggaggctgaggtaggcggatcacctgaggtcaggagttcaagaccagccgggcaaacagggcaaaaccctgtctctactaaaagtacaaaaattagccaggcatgatggcgggtgcctgtaatcccagctacttgggagactgaggcaggagaaccaggaggaggaggttgcagtgagctgagagtacaccactgcactccagcctgggtgacagagtgagactcatctcaaaaaaaagagaaaaacacaaagtggttattccatttcacattcccaccagaagtgaatgagagttctagatccatatgtccaacacttgttagacattctaaaagtatgtagtggtatcttgctgtaggtttaatttttatttatctaatgacattaagcatccttggctgggtatggtggcacacgcttgtaatcccagtactttgggaggccaaggcaggaggattgcttgagttcagaagttcaagaccagcctgggcaacatggcaaagccccttctctattttttttaatttttaatataaaaaaatttatacccagcactttgggatgccaaagtgggcagacggtttgagctcaggagttcaagaccagcctgggcaacatggcaaaaccccatctctacaaaaaaatacaaaacttagctgggcatggtggcctgagcccatagtcccagctactggggaggctgaaatggaaggattacttgagcccaggaggtggaggttgcggtaagccaagatcgcgcaactgcactccagtctgggcgacagagtgagacgctgtctcaaaaaatatatatatataaaattttaaaaagacactaagcatcctttcatgagcctattttccattcatatatatatttttggtgacgtgtgaattcaaatattttgcccatttttaaaattagtttattactattcataaaaatctgggtttcagatttttatgtttaattatctttttttcagatatttgtttaattatctttttttttcgaggcagggttttgctctgtcacccaggctggagtgcagtggtgcaatcacagctggctgcagtctcaacctcccaggctcaatcaatcctcccacttcagcctcctgagtaactgggaatacaggtgcaagccatcacacccggctaatttttgtattttttgtagagacagggtttcgtcacattacccaagctggtctcaaactcctgggctcaagcaatctgcctgcctcagcctcccaaaatgctgagattacaggtgtgaaccactgtgcccagccctcataaatatttccttccctcataaatattttcttcctcataaatatggccttcataaataatgtccttttattctcttaaaagcatatttcaaaagcattcttaatttcaataaagtttaatttgccaatttttttttttttttttttgagatggagtctcgctctgtctcccaggctggagtgcagtggtgtggtctgggctcactgcagccttcaccacctgggttcaagcaattctcctgccttagcctcccaagtagcagggattacaggcacacactgccgcgcctagctagtttttgtatttttagtagagacggggtggccaggctagtctcgaactcccgaccttaggtgatgcacccaccaaggcttcccaaagtgatctgtcaatattttgatttgtagcttttgtctttagtgtcctatctaacaaatatttgcgtaacccaaagattttctcctgtattatatttttctcttgaacttttttttttgtttgttttttaagatggaatcttgctctgtcgcccaggctggagtgcagtggcacaatcttggctcactgcaagctccgcttcccaggttcacgccattctcctgcctcagcctcctgagtagctgggactacaggcacccgccaccacgcccagctaatttttttttttttttatttttagtggagacggggtttcaccgtgttagccaggatagtctcgatctcctgacctcgtgatccacccgcctcagccacccaaagtgctgagattacaggcgtgagccaccgctcccggccttctcttgaacttttctagttctaagttttagaattacatccatgatctactatgttaatttttatatatagtgttagataagggtcaaagttaactttttgcatatagatatccaattatttcagccgtttgttaaaaatattttttttttttctgaattgcctttgccactttgttgaaaattaattgatcacataaatttgagttttttatggaatctccattctgctcattgacctatttatatgtcttgacactgatagcacatggtcttgattatcatagctttatagtaagtcttgaaatcagataagttttgtttgtttgtttgtttgtttgtttttgagatggagttttgctcttgttgcccaggctggagtgcaatggcgcaacctcagctcactgcaacctccgcctcccgggttcaagcgattctcctgcctcagccttccaagtagctgggattacaggcacccaccaccacgcccagctaatttttttgtatttttagtagaggcggggtttcaccatgttggccaggctggtcttgaactcctgacctcaggtgatctgcccgcctcggcctcccaaagtgctggcattacaggcatgagccactgcgcccagccgagatcaaatagttttaatcttccaactatttttttctcaaagttgttttgtctactccatgtcctttgcatttctaaatgaatcttagaatcagcttatccagatcaacaaaaaaagcctactgggatttgactgaaattccagggaatctgaagatcaatatagggcaaattaacaccttaaaaatatggtctttcaaactctatggatatggtgtatatttccatctacttagatattctgtaatttctctcagaaatgttttgtgcttttcatgagcaggccttgcacatctttggtcagattcattcctaagtgtatcatacttttgtgctcttttaaattgtttttgtttgtattttagaaacagggtctcactctgtcacctggctggagtgcagtggcaggatcatagctcactgaaacctcaaactcctggccacaagcaatcctcctgcctcagcctcccagagtgatgggattacaggcatgagccactgtgtccagactatttttaattttttaatttaaaacttatttaaaaattttaatttaattaaaatgtattttaaatttttagttttttgctaatatatagaaacataattgatttttgtctattgatcttgtatcctgaaaatttgcttattagaatagctttttatacattcgataggattttccatgtagacaatcatgtcaactgtgaataaagaccattctcttcttcctttccagtctggatgccttttatttctttttcttgcctattgcactggtttgaacctacagtacaattcagtgggagaatgggtggtcttttcactaaatgagtctgggtcaattagatactaatataaaaaaatgaatcttataaaccaaatagtatctgagataggtctcaatcaatttagaagtttatttttccaaggttaaggacttgagaaaggtccgtgcatttctccaaagatgactttaaaggcttcaatatttaaagggaaaaagcaggctggagggaaaacagggagggaatggtcacgttactaaatccacgtgtcgcaagagaaaaagagcacataagggagtgaatagtcaatcatgttattagtctcctgctcagtaaatcagcactttacataagataaggtgaacaaagcatagctacctgtggagatctttaaccttttatccacagctctctgcttaggaacaaaaggaaagttcgtttcttgcctgattcagctttcagcttaattttttctccttttggcattgtgaattatttttttctgtgtactctcacagaatggaatggcatagtgaattggggtcccaagtttctatttttctttcacaacctttacccctacctaacaccaaacacaaaatttaatttgagaagcatcatcgacctcaatgtgaaaggcaaaccaagaacactgttaaagaaaatataacagatcaggttaatgtgtaagcataggcaaagattccttaaacaggatgcaaataccaataaccatgaaagagtaataatttatagaataagtttcagttgtaaattaattagtaaaatgtgtgtacctcaaaaaacaccattaagaaggtgaaaaggtaagtgacgggccaggagaacacattgcaaaacatgtgtcaaagagccctagtaattgataagaaaaagactggacaaccaatttttctttttctttttttttttttttttttcttttttgagacagcgtcttgctctgtcacccaggagtgcggtggcgcgatctcggctcactgcaacctctgtctcctggattcaagcgattctcctgcctcagcctccccagtagctgggactacaggctcgtgccaccacgcccggctaattttttgtattttttgtagagatagggtttcaccatgttagccaggatggtctcaacctcctgaacctcctgacctcgggatccatccacctcagcctcccaaagtgttgggattacaggcgttagccacgcccaatttttttagaggaggggaggggcagaggcgtgccctgaccttcaccaaagaggatagccacaggccaataagcagaagaaaaggtgtttagcatcattagtccatttgcaaattaaaaccaggacagagatactgttgcagggcatgtggaccccaaaattggggcttaacccaggagggttcttggctttgcccagaagagaattcaagggtgagccggtggtgttagcaacttttcttgaagcagccgtgaataacagcagcagaggggctgctcctgcagagcagggccacccacaggcagtgtgcccagaggagcagctcagaggcagtgctgcagtcacgcttatacacactttaaattatatgcaaattaagggacagattatgcagagatttttagaaaaagcatggtaacttctgggtcatcaggtcatcgccatggaaagggatggtaacttctgggtggtgccatggcaatggtaaagtgacaggccacaccactgggtgtgtcttatggaaagctgcttctgctcagacactgttttagctagtcctcaatttggtccagtgtccaagctccacctgcagggttgagtcctgctccctgtcacaataccactacaaaccaacctgctcaaccccaccatggtgcaaccacttaggaaaacacacggcatctactaaagctgaacatattcactctatgacctagcagctccattcttagtatatatccaacatgagtgctatgtccaccaaaacacatgtatgataatgttcatagaagttttattcataatagccaaaaactggaaacaattcaaacgtccatcaacaatagaatgaataaatagattgtatccatacaatggaatacagtcgtgtgccacttaacgatggatatacgttctgaggaatgtgtcattaggtgatttcatcgttgtgcaaacctcatagtgcacttacacaaacctaaatggcctggcctttacctacctatgctatatggtatcgtctattactcctaggcccctaaattaattgcacaggatgttactgtactgaacactgtgggcaactgttacacagtagtaagtattggccaggtgcagtggctcatgcctgtaatcccagcactttgggaggatgaggcaggtggattgcttgacgtcaggagttcaagaccagcctgaccaacatggtgaaacgctgtctctactaaaaatacaaaaattagttgggtgtggtggtgggtgcctgtaatcccagctactcaggagggtgaggcaggaaaatctgaagccaggaggcagagattgcagtgagccgagatctgtgccactgcactccagcctgggcaacagagcaagactccatctaaaaaaacaaaaaataaaaaaaattaagtgtttgtgtatctaaacatatctaaacatagaaaatgtatagtaaaaatacaatataaaagatttttcaaaaggtacatctgtgcatgacacttacgatgatggagcttgcaggactgaaagttactccgggtgtgtgagtgaatgagtggtgagtgaacgtgaaggcctaagacattactgtacactactctcaactttataagcactgtacacttaggccacactaaatttattttttaatgtttttatttgttccataataaattaattttagcttactgtaactttataagcttttttaatgtttgacttttgtagtcttgtaacacagcttaacacattgtacagctgcaaaaaaaatttctttctttatatccttattccatgaatcttttctatttttattttattttattttatttttagtttttaatataaacacacacataagcccgggtctacacgggatcaggatcatcaatatcattgtcttccacctcaacatctcggcccactagaaggtcttcagggacaataacactcatggagctgtcacctcctgtgatcataataatgccttctggatacttcctgaaggacctgcctcaggctgctttccagttaaccttttttatataagtagaaacagtacattcaaaaataacaattaaaactattgttttaattggcacagtggctcaagcctgtaatcccagcccttggggaggccgaggttgggcagatcacctgaagtcatgagttcaagactggcctggcctacatggtgaaaccccgtttccactgaaaatacaaaaaattagctgagcatggtggcaggcacctgtaatcccagctacttgggaagttgaggcaggagaaccgcttgaaccagggaggcagaggttgcagtgagccaagattttgccactgcactccagcctgggcgacaaaagcaaaattccatctcaaaaaataaaatgagtacggtatagcacatacacatacaaaatgcttatgaaagaaatccaagacttgaataaatgaagagacatgccatgttcatggactataagactcaacacagtaaagacgacaatcagcccgaaaatgatatacaggtttaatgcaattccaattgcattgttactgaagataccgtttgctagagggcatgaagcttttaagtcggcgcagctcatgcacctgctcaatgcagatcttgtcttcttgtacctgagccctctgctgagttaactgctacaaagcttcctgctggtggaatgcctgattctgccttgctggtgtgtgtggttcctgccgtgagtccttctgaacaggccacttgaatcaatgttttttgtttgtttttgtttttgagatggagtctcactccatcacccaggctggagtgcagtggcaagatcttggctaactgcaacctccgcctcctggattcaagcgattctcctgcctcaccctcccaagtagctgggactacaggtgcatgccaccacacctggctaatttttgtttttttttttttggtagagatgggatttcaccatgttggccaggctggtttcaaactcctgacctcaagtgatccacccacctcggcctcccacagttctggaattacaggaataagccaccgcacccggcccgtgaatcaatgtttagttgaatataagaagaccccggtgagcattgcagagtggtggcgacagtaaactaaactttcagtccctacactccatttggccaatgaactatgagatgacagggataaggaaggaaatgtagacgaggctttgaatgcctcggtaggagggtccatttgcccagcccctggtatgagaagctctgcagcccacgatggggagcagatgtgggttgaaatgaaaccaaattcatgctaagaggagaaactgctcagtgttcatgaaggggacccgggtagaaacccacctgcggccgggctgtggggacggattcatgtctggctgggatgggtattgggggtggaaggcgaagacaacggaatgaccctgcagaccccgtgcttgggatgggactaccacttgacaaagcaggggaacggccagactcactccaactcctccaaactccaatttacgggcgagaaacgtttgggaacccccaagaccctgtagagccaaagcagacaggcaaggctacaatggcaacagtttagtaggatttggtgaaatcccattaaaacgttcaagaaagctctccgcgtgtgggaaggggtaacctaaacagcatccctgagtctgaaaagctatgggctaagggtgcacaagtcaattgaaccctgtgttggagtcggaccagtgtcctctgccgccatctagtggaaatacacaggaatgcggacattttctaaagtgacagattttttaagcagtcataaattattgtttattttaaaggtttaagccataccttaagactggataaaacccttcatttacatatggcagacagagggaaaatacactttttataaaatgcttaaacaactttcactgtagtaagttggtttggttaaaaactatcatgtgatatcatttgatgtaaaatatctaggccggaaaaaatgtatatatatctaggccgggcacagtggctcatgcctgtaatcccagcactttgggaggctgagacgggtggatcacttgaggccaggagtctgagaccagcctggccaatatagagaaaccctgtctctactttaaaaaaaaaaaaaaatagcggggtgtggtggcacacgcttgtaatcccagctactcgggagactgagacatgagaatcacttgaacccaggagggggaggttgcagtgagctgagatcgcgcctctgcactccagcctgggtgacagagtgagactccatcagaaaggaagagaagaagagagaaggagagaaaagaagagagaaggagagaggaaagaaagaaaaagaaagggaaagaaagaaaagaaaagaaaagaaaagaaaaaatgcttagaattcacggaataaaaggagtattgcatgcattataaaaactaatggcaaaaactatttcagttgcccagcatatggggggacatcccattggggaatagaaatagaaatacaaatcctgatgatcaccaaatgtactaacttgtttttttgtttgtttgttttttgtttttctgagacagtctcactatgtcacccaggctgaagtgcagtggtgtgatcatagctcattgcagcctcaaactcctgggctcaagcagttctcctgcctcagcctccccagtacctgggactacaggcgcatgccaccatacctggctaatttttttgtagagacagggtctcatcatgttgcccaggctggttttgaactcttgggctcaggcaatcctcctgcctcagcctcccaaagtgctggaattacaggcatgaaccaccgcacccagcctgaacttgtccttttttgttaaaggtgttaaccaaagtcttggaggtacaccactggcaaaagtttaacaaaatgcttctgcatgagaatctaaccttagggttagttccctgaaagcatgtgtcaactacgttgctaggcaacattgcttagagtaaaaatgatcattggtaccttgtacctggaatcaccaggtagtcgtatgtggtatttataccagtttttgctttctgagtgtggaatttttgtaactgggcatgtcccttgcagagaccctggaagctatgtttatggaattgttatgggatggtctcctgtgaggcatcgggcttttaaatcaggaacgctggaagcagtggctcatgcctataatcccagcactttgggaggttgaggtaggaggcttgtttgagcccaggagttcgagactaacatggggaacatagtgagactccatctgtacaaaaaaaaaaaatttaattagccaggtatggaggcatgcacttgtggtcccagctactggggaggctgaggcaggaggagcgcttgagcccaggagttagaagctgtgatgagccacgattgtgtcactgcactccagcctgggtgacagagtgagaccctgtctcaaaaaaattgatgaagccatcatttagggcagctctcctaaaggcccagtgtagatctcgcctgtctccttgtatctactgagtgaactgcatcaaggacactagattagaggaatgactacctgaaggaagccgctttgataacagctagggcccctgcgcttcatccttctaaatactctgaatgtgactcctggtcatctcgtgagtttgaataagcccaagaagaccactagtggggattgcataagttacatcagccaaaatgattcttcttttcttttcttttgagacagagtctcactctgtctcacaggctggagtgcagtggcccaatctctgctcactgcaacctccacctcccgggttgaagtgattctcatgcctcagcctcccaagtagctggcattataggtgcctgtcaccacactcagctattttttgtatttttagtagagatggggtttagcaatgttggccaggctggtctcgaactcctgacctcaagtgatctgctggcctcagcctcccaaagtactgggattacaggcatgagccactgcgctgggccctcttttgtcttctttaatttggaatgcttctttaactttttttatttttcctttcatgacatggacattttgaagagtacaagcctattgttttagtagaatgtccttcaatttcgctttgtctgatgtttcctcatagtcagattctgggttggggcttcccctactttagggaagtccactctgataccctccccaagccttgctctcaagttcacagccaaggggtcaaacccattggagtctgcccactgccaccttctggagcacaggttggcaaattttttctctgaaggaccagagagtaaatattttaggatttgcaggccaagtggtctgtgtcacaatttgactttgccatcgtagcctgaaagcagctacagataacacataaatgaattagcatgactatattccaataaaattttatttacaaaaaacaagtgaagggccagatttggcccctgactctaacccatgtcccagcccccaaaacctccagagttccatgcccaaacagcctccagtctgtttccagggtaggcctctctttcctgcatgctgtatcctgaggggcatcatattgccatgtgggtgtatgttttccctagactaagaggtggctgggttttgttttgctttgtttgagattgagtctggcgctgtcgctcaggctggagtgcagtggcacgatttcagctcactgcaaccgccgcctcccaggttcaagtgattctcatggccttgtcagccactgcacccggccaaggtggctgttttgagggcagatgtggatacacaagctgaagtgtctgcaagagtgcaggtgaagattcaaggaatcctcccaccgcagcctcccaagtagctaagaccaaaggcatgcgtcaccatgcctagctaattttttaaaaaatttttagaggccgggtgcaatgcctcacgcctgtaatctcagctctttgggaggccaaggcaggcagatcgcttgaagtcaggcgttcaagaccagcctggccaaaatggtgaaaccccatctctaataaaaatacaaaaaaaaaaaaaatagcctagcatggtggtggacacctgtagtcctagatactcagcagactgaagcaggaaaatcacttgaacccaggaggcagaggttgtagggagccaagatcacgccactgcgctccagcctaggcaacagcgtgaaactccatctcaaaataaataaataaataaaataaaaaataaaaataaaaataaattgttttggccaggcacagtggctcacacctataatctcatcactttgggagactgaggcaggcagattgcttgagcccaggagttcaagaccagcctgggcaacatggtaaaattttgtccctaaaaaaaaatttgcttttcctagctggcacaggccaggtgtggtggctcacggctgttatctcagcactttgggaggccgagatgggcagatcacttgaggtcaggagttcaagaccagcctggccaacatagtgaaacactgcctctactaaaaatacaaaaattagccaggcatggtggcacacacctgtaatcccagctacttgggagtctgaggcagtagaattgcttgagcccagaaggcagaggttgcagtgagaaaagattgtgccactggactacagcctgggtgacagagcgagactccatcttgaaaaaataaaaaaaaattagccaacgtggtgatgcatgcttttagtcccagctattcgggaggctgaggtaagaggattgcttgagcctaggagttcaaggctgcagtgagccgtgattgcatcactgcactccactctgggtgacagagcaagaccctgtcttgacaaaaaaaatgttttttaagtttttgtagagacagagtctggccatactgcccaggctggtctggaactcttgggcttaagtggtcctcccacctcagcctcccaaagtgctgggattatacgtgtaagccaccagcccagctacaattctaatttttcttttcttttctttttttttttttttgagatgaagtctcactctgtcacccaggctagagtgcaatggtgtgatcctggctcactgtaacctccgcctcccgggttcaagcgactctcccacctcagtttcccaagtagctgggactataggtgtgcaccaccaggcccggctaatttttgtatttttagtagaaacagggtttcaccacgttggccaggctggtcacaaactcctaacctaaggtgatccacccaccttgccctcccaaagtactgggattacaggcatgaaccaccgcacctggcctagaattctaacttttagacatttagacacatggtatgtcatctccatttgcactttgcccctgcccataatgcaaggggcagcctgtgtgaaagcacaaacgcttctcagaacagccttagccaggctggcctggtccccacagatgttcaccagggaagggagtctgcaggctggcttctatctccacatctcccctgggagagtccggagcaattcctgggccatgcctcccagcctccccttgcctgcagccactcagctcagcaccagaccccagccttggtgctcagcttctcaacaacagagcagagaagaccccaaactggccagttcctccgtcttcccaccctctacttctggaatctcttttctctttccttcttcctttttttaatatacatttaaggggtataagtgcagattccttaaatacatatatttcgtcatagtgaagtctgggcgtgtagcgtacccatcacccgaataatgaacaatgtacccaacaggtaattcttcaaccctcatccccctcccactctcccacgttctggagtctccaatgtctattattccactctgtatgtccatatgcacccattgtttagctcccacttataagaatacacagtatttcactttctgcttctaagttatttctgttagaacaatggcctccaggccaggcatggtggctcatgcctgaaatcctgcactttgggaggccgaggcgggtggatcacctgaggtcaggaattcaagaccagcctggccaacatggtgaaaccctatctctactaaaaataaaaaaattagccagacatggtggcccacacctgtaatcccagctacttgggagactgaggcaggagaaccatgtgaatctgggagacggaggttgcaatgagccaagatcgtgccactgcactccagcctgggtgacagagcaagactccatctcaaaaaaaaaaaaaaccaaaaaaaacaaaaaaaataacaatggcctccagctccatcccatgtggctgcaaaatacatgatttcatccttttctagggctgagtagtattccatggtgtacatataccacgttttctttatccagtcctccgctgatggacacttagattgatccatgactttgctattgtgaacagtgctgtaaggaacatacgagtgcaggtgtctttttgatatgatttatttccctttgggtatttacccacagttggtttgctggatggaatggtagttctattgttagttctttgagaaatctctatactgttttccataaaggttgtactaatttacattcccactaacagagtacaaacattcccttttctctgcatctttgccaacatctgttgttttttgtggaatgtcttttctttatagtcgatctaatttcctttaacctcttgatatatgaacaacaaattcatcccttgcggcagcattaagacctttggaggtttcctgctctcctctcattcactgaacacacacaccaccaccaccaccccactaccatgactaccccatctctgccatctgatcagcacagggcctgaaggcacattccctgtacccagagcactatgaagcaacacaatgttgtaggagttaccatcctaccaacactactgcacgctcacgtccaagatgctttggaattccagctaacaaagtaacaccaatatggtacccaggtcgcataagcactcaagtgtatccagaaagatgagcaattctttttttttatatatactttaagttttagggtacatgtgcacaacacacaggttagttacacatgtatacatgtgccatgttggtgtgctgcacccattgagcaattctttaaaatgtgatcccatgaaatatttctaacttttcacaatctcaaaaagtaagtgacagctattgctctaaatatcactttcaataatatagtacttgtagcaaggcatcctataattttaagagctacataatgtaaattacgtaatttacataattattataatatagtaactgttcttttcattattttgctcagtgtttttacttttatcctaaaattgctttccataaactccaaaagttgtttcttttaatactttcagtctctagagaaaaagcaattttatgaaagtgttttgcaataatatattgattaattactctatcattttatttgccaatagttaggcccattccttagcataatttacttatttgtctcttcattgactcaggccaccatcagaacacataattattcatgataagaagttgggcaaagcaggaattttgcacacaaagaggtagagccgaatcagatattgagtacattaatttcttttgtaactgggtgctgtaataagagagctgaggcttggactttaaaacttgtggtacaaatcttgacccagccgtcaaccacctcaagtcaagactatcaccttccccagcccttagtgcccccactatcgagagaggaacttggtgatactggttcctgtacaacacaggtagtatgacgatcaagtgataaaatgcttataagagagcattaataccagtgacatcaatgtgctagttgttatctcatgacatgcaaagtcttctcattggatcatgattcccaatactgtcatggcattgctttcctttgacagattgtgatggttggtttttcatgacaacttggctaggctaagggatgggcagatcactggtacaacattatttctgggtgtgtctgtgcagatgcttctggaatagattagcatttgaaacaggtgactgagtaaagattactctcacccatgtgggtgggcatcatccaatctattgagaccctgaatagaacaaaaagacaagaggccaggcatagtggttcacatctgtaatcccagcattttgggaggccaaggcaggaggattgcttgaggccaggtgttcaagaccagtctgggcaacagagtgagatcttgtctctacaaaaaatttaaaaattagtgtggcgtggtggtgagatgggatttgttcccttgaccttcacccccttcatgggcgagaactggagtggctcatttcgctcagcctgccgctggccactccttgcaagagggagcgtgtgagcaagcgagtgtgggaaccagagggaacaaacgctagaaccaagttctggcgggagcaggctctgtatgggcctcacagcagcatccaagcccctgcccttttcgcacccaggttcttgtccggcatccaggaaggatcaggttgcatgaacggattgaagggtagcatatgtggggtatcttactgggtgatggaagtggctctcagagggatgggaattggaaaggggatggtgcgggaagaaggtgatcttcccctgaagccacaccatctgaagttagctgtgtcttgcagagatccagccactgcactccagcctgggcaacagagcgagtctccgtctcaaaaaaaataaaataaaataaataatttcaacagaattattaaagatgttaaatagccaggtgcagcgattcatgccagtaatcccagcactttggaaggctgagacagcaggattatttgaggtcaggagttcaagaccaacacagaaagaccctgtctctaacaacaacaaaaaaaaatttagccaggctcatgttggtgtgtacttgtagccccagctactctgaaggctgaggcaggaggatcacttgagatcagaatttgaggccacagtgagttatgactgcactactgtactccagctcaggtgatagacagcaagaccctgtcattaaattaaaaaaaaaaaaaaaaagatgtaaagtagagggtggacccaaaggacaaatactgtaggaccaataccacttatatgaggttcccagaggggtcagattcacagccacagtaggcaagatggtggtttccaggggctgggggaaaggggaatgaagagttattgtttaaattggtactgaattttatttgtgtgtttgtggctttgttttttgtttttgctttgtttttgttttgttttgttttgttttgagatagagtctttgtcacccaggctggagtgcggtggcatcatcttggctcactgcaacctctgcctcccagattcaagtgattcttgtgccttggctgccccagtagctgggattacaggtgtgcaccatcgtgccaggctaatttttgtatttttagtagagacagcatttcaccatgttgcccagactgatctcgaactcctgagctcaagcgatccacccgcctcagcctcccaaagtgctggccgtgcctgactggggatagaattttagtttggggagatagaaaagttctggagacagatggtagtcatggttgcacaataatgtgaatgtatttaatgccactgaactgtacacagagaagtggttaaaatggtgatgtttatgttatgtgtattttatcatacgcacacaaaaataaagggtagcagtaatggacgaagtgaagcagaggctgacggggactggaatggccatggaggggaggtggagaggggaatagcagccaagcagggagcaacccatactttgggaccaccaagtggctcatgccccataaattcccagtagagcaaagggtagaagtaagacatggagtggaatcttcctacaccctgaccctcacccatctcacacagcagccatgtagtagcttgacatgcacccgccccagaaaagttgcaggggttcttctgttaaaaaaaaaaaaagaggctgggtgcggtggctcacacctgtaatcccagcactttgggaggccgaggtgggcagatcacttgaggtcaggagtttgagaccagcctggccaacatggtgaaaccccgtctctactaaaaatacaaaaattagccaggcgtggtggtgcacacctgtaatcccagctactcaggaggctgaggcaggagaactgcttgaaccagggaggtggatgttgcagtgagccataatcgcaccactacactgcagcctgggcaacacagcaacactctgtctgaaaaaaaaaaaaagcaaatgtcttaaaacacccacaatctgtcattggaggttcaccaatgtctagagaatggcttccttcctgatcaccctaagtgaagtcctccagtgaatgagtccactaaaaatacagaggccctcaacaaatgatttatgacatcgttctcacatacattccaatatggtgactttgatgaaagtctccaacatgcaagactcacactaagatatgcaagcaaaaagcaggacgaggaggcagggacatcttcatgctatgtaactgtcagcacagccaaacccacgcatagtcagaaccagtagcacatgtgcataacgggcccaccctaccatgcacacagcctggacagcaggcctgcgtggagcaaacaaagataactcaggaatagaaaagaactttaaaatatctctatgtacttggcctgtgagctaaatctgcatttatcatagctggaaatcaatagacaatctccaaaatggatgaatcaagaactggtgataatgggatactactcagccattaaaaaaaaagaaattgtgtcacttcacatgcaaccccagcactttgggaggccaagatgggaggattgcttgaggccaggagtttgagaccagcctggacaggagagggagacctctgtctctaaaaaaagaaaaagacatcatgtcttttgcagcaacatggatggaactggaggccattatcttaaatgaaacagctcagaaacagaaagaaaaatgctgcatgttctcacttgcaagtgggagccaaataatgtgtacacatggacataagtgtggactgatagacactggagactaggaaaggtgggaggctgggaggagagtggatgatgagaaatgaacaggtacaggttgggggcagtggctcatgcctataatcccagcactttgagaggcctagttgggtggctctcttgagcccaggagttcaagactagcctgggcaacagggcaaaaccctgtttccacaaaaaatacaaaaattagctgggtatggtggtgcatgcctgtagtcccagctacttaggaggctgaggtgggaggattccttgagtccaggaattccaggctacagtgagcagagatcatgccactgcactctagcctgggccacagagtgacagcctgtctcaaaaaaaataataaaaacaaaaaataacaggcaaaatgtactttattcagatgatgggtacactaaaagccctgacttcaccattattcaatagatccatgtaacaacactgcacttgtacccctaaaattaacacaaatttaaaataggaccaggtgcagtggttcaggcctgtaatcccagcactataggagacagaagtgggtggatcacttaaggtcaggagttcaagaccagcctaagcaacatggtgaaagcctatctctactaaaaatacaaaaattagccaggcaaggtggtgcatgcctgtaatcccagctactcgggaggctgaggcacaagaattacttgaacccaggaggtagaggttgcagtgagcctagatgggtgacagcgagatccatctcaaaaaaataaaataaaataactagtgatgtaaccctattatttccatgcaacaataaccaccaggagaaacagctgaaggaactaaatatggttgcctccataggaccacggctggggagagagaggccggaatgatctccatgcatcataaaccctcctgcataatttgattgtttaaccttatgcatgtattagtgatactttgatttttaaaaaaattgttccaaagaaaatgactagaaggttttttctcctacagcactgtttcattctggaatcttccaattaagcttttggctaaacacataaatatgataatgatgattattcaggaatcagaaggtttgtaaaaacattgtaccattagagtaatcaagctctgctctaacacatcttggctttttgggataattagaccacactggaggcccagatggggtgaatgagaaagccatgggtatctgccacagagtaacaagaaaaccgtacacaaacctactcagctggtagtttgaaatctgcatgttaacttagtacacaaggagaaaggaataaaaatacttggatttagggcaaaacatttcactttaaaaactaagcatagaacatgagtgcagtaattaatgtcctacataacttattttaagcccttgtgttaaaattgactcttttgggtgaggggaggggacaggtctcactctgtcccccaggtaggagtgcagtggtgcaatcacagctcactgcagcctcgacctcccaagctcaaatgatcctcctgcttcagccccccaagtagctgggactacacacatgcaccaccatgcctggctaatttttgtagagacggggttttgccatgttgcccaggctgatctccaactcccgggctcaagagatctgtccgccttagcctcccaaagtgctgggattacaggcatgaaccaccaggcctgacctaaaacaaaatctttaaagctagaagtgatttcttctatacgttccattttttaaaaaattcacctcctactgtgagcacaatacaaaaaaaaaatttaacctattaattcatctaaccaagatttattgtgttcctactctgagccaggtcaagttggcactaagaatgcaatggtgagaccaggcacggcagctcatgtctgtaataccaggactttgggaggctgaggtgggtggatcacctgacgtcaggagttcgagatcagcaactatctcagacagcagatctcagcagtgagaagtctcccgaactgaaaaatatctaggctgagctgcagtgagaaggcttgacggggagaatctgggagaagtttcatgtggtttctggaatacaggacaaaggcttggaggggcgaggcacagtggctcatgcctgtaatcctagcacttgggaaagcggaggcaggcagattgcctgaggccagaagttcaagaccaacctggccaacatagtgagactcacctctctatttatatttaatcatattatatgataatgaaatggtttggacctgtattcccactcaaatctcatgtcgagttgaaatcctcaatgttgtaaggggggcctggtaggaggtgatcagatcatgggggtggtttctaatgggtttgcaccatccccctagtgctgatctcatgatagagttctcaagagatctccatggctgtttaaaagtgtgtgagcggtggttcctgcctgtaatcccagcactttggtgggtggatcacttgcggtcaggagtttgagactagccttggtaacaagatgaaaccccatctctactaaaaataccaaaattagctgggcgtggtggtgggcacctgtaatcccagctacttggcaggctgaggcaggagaatcgcttgagcccaggaggcaaagattgcagtgaaccgagattgcgccactgcactccagcctgggccacagagtgaaactccatctcaaaacaaaacaaaaattgtgtgacacctccccccaccattatttctgctccatccacgtaagacacgcctgcttccccttccccttccatcacagctgtaagttccctgaggcctccccagccatgcttcctgtatagcctgcagaaccatgagccaattaaacctcttttccttataaattacccagcctcaggcatttgtttctagcactgtgagaatggactaataccgacaatataaaaaatatttttaggccgggagtggtggctcaagcctgtaatcccagcactttgagagggtgaggcaagccgatcacctgaggtcgggagttcaagaccagcctggccaacatggtgaaaccctgtgtctactaaaaatacaaaaattagctgggtgtggtggtgcacatctgtaatcccagctacttgagaggctggggcaggagaatcgcttgaacctgggaggcagaggttgcagtgagccgagattgcaccactgcattccagcctgggtgacaaagcaagaatccatctcaaaataaataaacaaatattattaagttaaggcttggagggagtagagagacagaagcggggaaggtaaacgggagagacaaaaggcgagaccagagatttaagcaagtgccaactcacacaggattttgtaaacaacataacccaggatattccaagagaaaagagcaaggagaagctattaaagccattgaaggctttggggatggggggaagtacaacagactgaatgtttatgttcccctaaaattcataaattgaaatcttagccctcaaggggatggtattgggaagtggggcctttagaaggtgactaggtcatgagggtcaagccctcatggataaaattagtgcctttagggtcgggcgctgtggctcatgactgtaatcccagcactttgggaggcctaggcaggcggatcacctgagatcgggcattcaagaccagcctgaccaacatggacaaaccccatctctactaaaaatacaaaattagccaggtgtgatggcgcatgcctgtaatcccagctattgaagaggctgaggcaggagactcgcttgaacccgggaggcggaggttgcggtgagtcaagatcgtaccattgcactccagcctgggcaacaagagtgaaactccgtttcaaaaaaaaaaaaatttaatgcctttataaaagagattctggccaagcatggaggctcacaaatgtaatccctgcactttgggaggccagactgggagaatcacttgagctaaggagtttgagaccaacctgggcaatatggtgaaacactgtctctattacattttttttttttttaatagcagggtgttgtggtgaatgcctgtagtcccagtgactatgcacgaggctaagacaagaggattgtttgagcccagaagtttgaggctgtcgtgagccatgatcacaccactgtacttcagcctgggtgacacagcaagaccctatctcaaaagagagagagacggccaggcgcggtggctcatgcttgtaatcccagcactttgggaggctgaggtgggaggatcacttgaggtcaggagttcaagaccagcctggccagcatggtgaaaccctgtctctactaaaaatacaaaaattagctgggcctggtggtgcatgcctatagtcccagctactcaggaggctgagacaggagaattgcttgaacccaaaaggtagaggttgcagtgagctgaggtggagccactgcactccagcctgggtgacagaacgaaactctgtctcaaaaaaaagagagagagacccagagagatcccttgcccctttctccatgggaggttttagcaaaaagacagccatctatgaaccaggagacagtcctcaccagaaactgaatctgtcagccttaatcttggacatcccagcctccagaactatgagaaataaatttcttttgctgataagccaccggtgtgtgatattttgttacagcagcccaaatggactaagatgtggggtgggcagggagtcttgagggacaggtttggcatcatcaaatttgctttagaaatattattttcaggctgggcgtagtggctcatgcctgtaatcccagcactttagcaggccaaggccagaggatcacttgaggtcaggagttcaacaccagcctggccaacatggcgaagccccatctctactaaaaaatacaaaaattagccgagtgtggtggcacacacctgtagtcccagctactctggaggctgaggcaagagaattgcttgaacccagaaggcagaggttgcagtgagccgagatcgcaacactgcactccagcctgagcaacagagagagactctgtctcaaaaaaaaaggaatttttctttactcagaaaaattaattatagattagtttccattattttgattactttccaatcatacatatcttatcaatttctattgttcgttgttagggtagttggacaaatatttgagaaacggtaaggataataaaactaattgtagaatgctattaagtttacaaagcacttagtcatgcttttactgcatttacttaggaggcagatggtatagacagatttgcacctggtgccaccattcttctgccctgtgtccatggaaggcactggtaattgatcacggtacaagctcctgatgtctcagacacaatctcagaatccttctcaacacaaatttccaggcaagcagtgtcatctgcttaagttgtcacttgatgaaaaattatatttgccatcctaaaatggtttaaagcacccacattgtggaattataacaacttgattgaaatccacgacttccaccttaatactagatctaagttacttgacttctgcttttgagttgggagggtgtgtgtgtgtgtgtgtatgtgtatggtttttgtttcattttttttttgagacagaatctcactctgttgcccaggctgaagtgcaatggcgtgatctcagctcactgcaacctctgcctcctgggttcaagcaattcccctgcctcagcctcctgagtagctgagattacagacatgcatcgccacgcccagctaatttttgtattttagtagagacagggtttaaccatgttggccaagctggtctcgaactcctgacttcaagtgatccacccgcctctgcctcccaaagtgctgggattacaggcatgagccaccttgcctggctggttttcgttttttgtttttgggggttttttttgagacattctcgccctgttgccaaggctggagtgcagcaccacgatcacagctcactgcagccttgacctcttggtcaagtgatcttcccagctcagcctcctgagtagctgggactactggaatgtgctaccacgtacaactaattttgttttatttttgaagagccagggtctcactatgttgcccaggctggtctcgaactcctggactcaggcaatcctcctgcttcagcctcccaaagtgctgggattacagtcatgagccaccatgcccagctagttttctcattttaaaattagacataaagacatgtaacagagggctgctctaactaaattaagaagcagcaaactatgaaattttaccatctatgtatttaactataccaattcaacgatcctgccttggcaagagagagtaagagaaagataggaattagtaacaattccactcaatgtgcatgcaccccagagcacgtatgggatgggcgacaccttccctagcaatggttattagtctcagtttcagagtgtctctcacagaataagaggttcacccagtgagagtgggtctgttgttcgaagggacatattttccaaaacacatggcccccaaatgcaagccaagagcattatatattgcttaaatgaaggaccagcagtctatctctagagaaaaaaaactagctaggaggtcctccctaaggatataacagatatgttcctaatggatttaaatatggccaaaggctgggtgtggtggctcacacctgtaatcccagcactttgggaggccaaggccggtggatcacctgaggtcagaagttcaagaccagcctggccaacatggcgaaaccctgtctctactgaaaatgcaaaaatgagccaggcatggtggtgcatgcctgtaaccccagctactcgggaggctgaggcaggagaattgcttgaacctgggaggcagaggttgcagtgagcagagattgtgccactgcactccagcctgggcaaaagagtgagactccatctcaaaaaaataaataaataaaataaaaattaaaaatgaatatggccaaaaaaatctttcaaattcctcttccaattaggctgtaaatatctaaataagccaccagttttgctgtaaagatgggggaaaacagataaagtaaaatatcatactgatttttcagatgtctataaaatagtctaaaggaactaaattctagagaaagaggacaaggcttcataggtaggaaaaattagggatcattgggggcatttgccaagtctgggcatgggcaggcagaggatgggccctgccacagaggatggggctctccttggctaagaagaaaccactgattctttaaacatctctacgggctggagcaacagatggaaatatctaagaactcaaaacacagtgctagtcttccatttttgctaagtgggttacagtgcaggaggctgggtcttctgtcttcctcattgaaagacagacagaaaactccactaattcttcatgctcaggtccaaaattccactagaagaaggggcccacaagacacgcagatcacatcttgcccttaagacatttaaaatccaggtgaacaaaaactaactaaatctgcaattcatccaaccccaattcagctccactgttgattggatctgactgatcaagctcctcatcctaattgactggcaagaggaaagggcttgccctctccagggaaaaaaatatttacttccgtcactttggttctttacaatgtctagaatacagtatctagctagacacaatatctggcataaaattaaaaattatgagatgcaaagaagcaggaaaatgtgatgcataatcaagagaaaaaacaatacatgcagattcttatatgattgagatgctggaactcacagataaggactttatgataattactataaatatgttaatgaaattagagcataaaatagacaaaatgataagaagatgaagattttttttttttttttggagacagaatttcactcttgtcgcccagacaggagtgcaatggcatgatctcggctcactgcaacctccacctcccgggttcaagcaattctcctgcctcagtctccccagtagctaggattacaggttcctgccaccacacccagctaattttggtatttttagtagagatggggtttcactgtgttggccaggctggtcctgaactcctgacttcaggtgatccacctgtcttggcctcccaaagtgctgggattacaagcatgagccactgtgccaagccaacaagatgcagattttcaacagaaaaatacactctctttaaaaagatagctggacgtggtggtgtgcacctgtggtcccagctacttgggggcgctgaggtgggaggatcccctgagcccaggaggttgaggctacagtgggctgcgctcgcaccctatactccatcctgggtgacagagcaaaagcctgtctcaaaaaattaaaaaagagagaaatccattaatctggggatcaagtgtactaacactaaggtgagatgcaatctcaggataagactttggagtattgtttaccatatatacattttgtttgtttgtttgtttgtttgtttgtttgaaacggagtctggctctgtcacccaggctggagtgcagtggcgccatctcggctccctgcagctccctgcttcccaggttcaagtgattctcgggcctcagcctcctgagtaactgggataacaggtgtgtgccaccatgccctgctaattttttgtatttttacagtatctcattgtgttggccaggctggtcttgaactcctgacctcaagtgatctgcctgcctcggcctcccaaagtgctgggattgcaggcataggccaccacgcccagtcactatatctaatttttactggtttccagaaagaactaatcgtgctgttccaagaagtgaagttagccaacaggatctacttcctctttcaatccaaggccacgctcctcccagacaaccccagccaacgacagaacacaacaggggtactagggcctaaccatttctgttccaaagagccatcttcactccagggcttcctgttgggttggccaagacgttgtcagatctgcagtacggtctggggctctccctgctcaatcctgcttcttctccgttttacctttctcaggcattacctccaataaacctcttaactctggctcagcatctaattctgagaagaaccaacagacacacatggctttagaactcaacctgtggactggcctcccaaagtgcctgtaatcccagcactttgggaggccgaggcatgtggatcacttgaggtcaggagctccagaccagcctggccaacatggtgaaaacccgtctctactaaaaatacaaaaattaggtgggtgtggtggtgcatgcctgtaatcccagctacttgggaggctgaagcacgagaatcgcttgaacccaggaggtgtaggttgcaatgagccgagatcatgccactgcaccccagcctgggccatagagtgagaccctgtctcaaaaagaaaaaaattcaacctgtgtaagatgtgtctcctccaatgtgtgtaagatgactgacccaataccaagcacaaagtagactttgtgtactttacaaagtatacaataccagtagatgttagatatctttgccttttgcatcatttaggatatgtgtttgctggtcaggagagactcaaaataacactgccacaaatagtgtcacaaaattcctggacttctagctgatcctgtgaaatagtcagataagtgagtaaagccatcttggaccctctagaccaggcaagctgccctcaatgattccagttgaggctacacggaactgaattgcttagtcaagcctgatccatgaaattgagaggtataataaagtgataattgttttaagtcactgaatttgggggtggttcctataaacagaacacatctcctaactaatacagagacaaaaacttaccttaaaagtttatatctaggccgggcatggtggctcacgcctgtaatcccagcactttgggaggccgagacgggcggatcacgacgtcaggagattgagaccatcctcgttaacacggtgaaatcccttctctactaaaaatacaaaaaattagctgggcatggtggcgagcacctgtagtcccagctacttgggaggctgaggcaggagaatggcgtgaacccaggaggtggagcttgcagtgagccgagatcgcgccactgcactccatccagcctgggcgacacagcgagactccatctcaaaaaacaaacaaacaaacaaaaaattttatctaataccatggtaccatagcatttggaaattactgctttcctcctttattttcatatgttgtttgttttttttccttttaagaaagtctttatactcacacaattctgtattcagcttttttacttacatattatttcaaaagcaagtgcctgtttttgctacataaacttagtttttaatagggccattttacatggaaagtttgcctttttgagatagaattcacatatcataaaattcactctttttttttttttttttttttttttgcgatggagtcttgctctgtcgcccagactggagtgcagtggcgtgatctcggctcactgcaacctctgcctcccaagttcaagcaattctcctgcctcagcctcctgaggagctgggattacagacgcccgccaccacgcccagctaattttttttgtatttttagtactacgttggtcacgttggtctcgaactcctgacctcgtgatctgcccacctcagcctcccaaagtgctgggatcacaggcttgagccaccgcgcccggccctaagttcactttttaaagtatacaatttagtgggttttcgtatatccacaaagccatgcaaccattatcattatatacttccagacattttcttttttctttccctttttgagatggagtttcactcttgttgtccagactggagtgtaatggcactatcttggctcacagcagcctccgcctcccggattcaagctattctcctgcctcagcctcccaagtaactgggattacaggcgtgcgccaccacgcctgactaatttttttgtgtttttagtagagacggggtttcaccatgttggccaggctagtcttgacctcctgacctaaggcgatccaccagcctcggtctccgaaagtgctgggattacaggcacaagcccctgtgcccatcctacttccagacatttttatcaccccagaaagaaaccctgcgccccttggtagtgacttcccattcctactcctcacccccatgtcccagccccttgcagccactaatctactaatattttctgcctctgtggatttgcctgttcttggtgtttcttttttttttttttttttttttttttttgagacagagtctcgctctgtcgcccaggctgcagtgcctctcgagtagctggaattacaggcatgagccactgacagtgagcttatcctttttccatctgtaacaatttccaaatgtacacctccatttcagatctcctgacttttagggtcataccaattatgaaatagacgcaattgcttggtgtcccaacaggcacttccagctcaacaagtgcaaaattatttgcatctattagtatttccatcctccccccaaataaacttccttttatccgttctccttatgctcatcactagccctaggactgacctaggtgttcagtcctggaactaggagtccttatctggctacacccaatcagtcaccaatctgttagattctactttatgttttgcaactcatggtttcctgcaccctagggcggcaggaactatgtataatgcagctgatcagttggtagcccctagtgtaatatgcacattaatctccgtttcatgtactagaaacaaggttgagaaccgtgacacattttatgaccatcgcaggcttcctaaagatccaaaatccattgttgcttccctgcttaagagctcccggcaacctgcagaaaaactaaattcttccccattcatgttttcagcagtagaagctctagaatttctacacttgaggagctatggggtaagaaagaagatctggaggatttgcgaggcttgtccaaagcaattcccagctagtacactgttttttccttatatttgtctttactttatgaggctaggggatggctgttggacaatatgggagaaacaaagccctcaaccctcaccacctttggtgtggccactgctatccactataactcctaatatactctgcattctttaggctgtggccacactgaattgcttactttccagaatgcatctcactcttcctcctgtaatcactccatctcctgtttgatctgaaagcttcttaatcccatctctatttcaggcaagatttgaagtccccctcataccatagacaaaaattggctcaaaataaatcaaagacctaaatgtaagagctaacacataaaacttagaagcaaacattatgggtaaatatttgtatcctggattaggcaatgctttattgcatatgacaccaaaagtgcaaacaacaacaacaacaaaaatgaataaactggactttataaaaattaaaaacttttgtgcttcaaaggacactatcaagaaagtgaaaagacaaccaatccgctgaataagagagactatttacaaattatagatctgattagggacttgtatctagaatatataaaagaactcttgccactcaacaataaaaagaaaaattgcccaatttaaaagtgtttagctgggtgtggggctcaacgcctgtaattccagcactctgggaagccaaggcgagaggatcacttgagtccaggcatttgagaccaacctgggcaacatggcaaggccctgtctctacaaaaaaatacaaaaattatctgggcatggtggtttgcacctgtggtcccagctacctgggaggctgaggtggaggattgcttgagcccaggaaggttgcagtgagccatgatagggccactgcattccagcctggatgacagagtggcaccctgtctcaaaaagatacacaaatggcggggtgcggtggctcacgcctgtaatcccaccactttgggaggccaaggagggcggatcacctgaggtcgggagtttgagaccagcctgaccaacatggagaaacccccactctactaaaaatacaaaattagccgggcttggtggtgcatgcctgtaatcccagctactagggaggctgaggctggagaatctcttgaacccgggaggcggaggttgcggtgagccaagatcacgccactgcactccagcctgagcaacaagagcgaaacaccgtctcaaacaaacaaacaaaaaaagatagacaataataggtgttggtgaggctgtggagaaaattggagccctcatacaattgccagtggaaatgtaaaatagtgtagctgctttggaaaacagtttgacagttcctcaaaaagttaaactctgagttaccatatggctcaactacttcattcttaggaggattgaaaacacatgttcccacaaaaacttgttcatagaggtactcatggatatttataatagcagaagtgaaaacaacccaaatgttcatcaactgataaatggataaacaaaatatggtatgtccatacaaagggatattatttagccttgaaagaatttccgggcacggtggctcacgcctgtaatcccagcactttgggaggccaaggcaggtgaacacttgaggccaggagttcaagaccagcctggccaacatggtgaaacccatctctactaaaaatacaaaaaatcagtcaggcgtggtggcatgcgcctgtaatcccagctactcgggaggctgaggcaggagaatcgcttgaacagaggagacagaggttgcagtgagccgagatggcaccattgcactccatcccgagtgacagagtgagactgtctcaaaaaaacaaaaacaaataattcaacttcctcgcatggaccttgtactgaaacagggatttccaaacctttctttgtagccactgtgcaccagccccatcagagctctgtctctctcctgtgtccctctcttatgatgccaggcttctcgccatttgctcactcagctcaccgtcctgcctgtgctctgccttcatcctgctgttcattcatgcagcaaatattaactgagcagctgccctgagccacgtgctgttactaggcccctgatgatacggcagcaaccaaaacaacatcactatctcaaaatgtttacattctagtgaaggagacagatacatacaaataattaaacagacatacttgagagagatacatgctataaagaaaatacaagctgagttaaggagatgagtggtattattttaaacaaggctgtcagggacgtcatctctggaggtgatgcttgagcagagactggaataaagtgctcaagtactggttgaattagacgcgactggaacagaacgagaagctaaatcatgtatatccttagacaccaaagtctggttttctctctgtgtaacatgggatcagtagagtgagtagaggaaggacatgatctgagttagatttttttttttttttttgagacggagtctcgctctgtcgcccaggctggagtgcagtggcacaatctcggctcaccacaacctccgcctcctgggttcaagcaattctcctgcctcagcctcccaagtagctgagactataggcgcgcgccaccacgcctggctaatttttttatatttttagtagagacggggtttcaccatgttggccaggctggtctcgaactcctgaccggtgatgcgcccgcctcgggcccccaaagtactgggagtacaggcgtgagccactgcgcccagccctgagttagattttaagaagatctctctggctgctgtattgagaataaagtactgggggcaagagttgacacagaggcaacttttagaaggctactgcaataattcagcccgagtaatcgtggcttgtgggagaagtgtaggaatggagatgagaagtcagatttaggatatattgtgtatacataacggagaggtgtagtcagaacagatgtggaagcaagacagggcaaggctgactcacggcttttagtctgagcagctgagtaaaaatggtaccgtttacatcaaatagggaacggtggtgaaggagcaggttagaggggaaacagggagcatggctttggacccttaacgtttgagattcgacagaaaccctggttcacggaattgatccaagctacatactgataattgggattagtgagttacaatggcgttgcaagccatgaaactggttcagaccggctgaatgagcgggacaggaaggggctgaaacacttgagtccttgtgagagccccagctccaggggcagcctcgggggaagctccccgggcgatgactgcggtaatggagccgtaggagctccacgaggtgcaggttcagcgtcttagaaggatgagcagcggctcgccacagctcggaggcgggtgggcagcgctccaggccgagggccccgcgtcggcaaagacacaggacccacgacaaggcggccacggcctgagtcaaaaggaaggccgcgcgcctcctctccagcccgcagcaagcgggtgccacgaggcactcagccggtccccgaagttcctctcacgcggccccaagaccaccaccgtagtccaggccaacaagcgctgccgggactcccgaggccacgaatgagccgggagccaccagtagccggccaagtctcgcgagagcgcggcctcgccctcccagcatgccccgcgccgccgccgctgccgccgccgccgccgccgccgcgccgcggcttgagggcgggaggctgggggagggtagcggagccggcgccgccgccatgttgggtctgaagcggctgctgtaggcgccgacggagcgagcgggcgtgcggagcgggcgacagtggcgtgggatctgcctctctgcgagcagctgggagcggcggcggcggcgccatgagcgggggcaccccttacatcggcagcaagatcagcctcatctccaaggcggagatccgctacgagggcatcctctacaccatcgacaccgaaaactccaccgtagcccttgccaaaggtacgcgggaccgggcctcagggtgggggccgagccgggcgccgctcggggctgctccccgctccggcccgcggcctcctcgttccctcccctccctccgtcgagctccgggaggcctctcgcctcccttctccgggccccggcgtcgcgggccggaccgcggcctccccgcggctccctggtttccgccccccggaatgtccgcgcctgaagcccggggaactacgggactgagtgcgcggcgggcggccctgaagtccgagaacgggccggagaacacggagaaacgcgtcttccaactccgaaattcggggcttctgccgtcttagcacaaaacaaagccggagtattcaaagaatttttccgcccagcttgagttcatcgcggatgcgttgactacacagcacccattttctcactttgttcatttcaattcgtggcgatcttcctctggtgaactcttgagtaatgtgctaaaactttgggtttgctctgcgacgcagacattctcgaaatgccatcgatgccgtggagcagatcccatctccctcggctcatcctctgttggtatttacctgttaaaccggaatcctcaaagcctgttgtgcaaccacctcattagggcgcgtggtaaaaatgcttgctgctgccccgacgcccctgtttctggaaacgggttcaagcttgatccaggatccttcttgaccaggcaagcttgacctttgatccaggctcagtgggcgttgactgatccctctggaggctctctgggaaagggaattcggccgagaaggaaggtgcccctacccacagtgttaatatttggcatccctagagtctgtgtgggttttgtttccgttcacacgtgcagggcctttgctccgccaggaaaccagaaagaaaataaactttagctcctgaatcttaaaggaaatctcacaacagtgtaaaatactttgagggaagctagataacctaggtgattttcccagcacttctggtagaggtgggaactgcatagcatggttagggaccctgtggataggttaggtccaaggataaagaagaagattttcgaaatctgtaaaattttaaaaatcgttaacagataggggagtggtttcacgggatcaagtatttaataatatttcttggatgctctggtaaatcctttatttatttatttatttatttatttttctaagatggagtttagctctttttgctcaggctggagtgcaaaggcaatgatttcggctcactgcaacgtccgcctcccgggttcaagtgattctcctgcctcagcctcccaagtagctgggattataggcgcctgccaccacccctagctaatttggtatttttagtagagacggggtttcaccatgttggccaggctggtctcgaactcctgacctcaggtgatccacccgcctcggccacccaaagtgctgggattacaggcatgagccaccgcgcccagcctctggtaaatctttttaatagccctggtgttgggacaaatcttatacctgggtagggaaccttttgatgttacagaactgtacaccataaaggagtagtatgagatggtgatagttgcacaactctgcaaatttgctgaagatcattgaattatacactttttaaaatcaccaagtctaattttaaaagtagtatgaaaaaccagggagtacccccacatttccctcttcaccttgtgaaacattatgcagtgacacattacctcattaaaacacctgtagacttggcggttagaaatcggctataggatgtatgatggatggtatttggtgtttattaaagactttcccagtgatgcttcttaagtaacttagtttttgcttggccttattttgaatttatttttatattttttatacaatagttacttagctgtatagtgtttttctggctttttgaaattatgaaaaagcctctctttatgaaattatgaaaagtgctgggtgagagccagatatgggttgaaaataatttctcattaaagtggtttaataaatttgttttaaagtattgctttacctaatctgaatttaaaagtgtcttgccagcttagtgactcaataagttggctgtgttacctttattcctcacaaagaaaaaaaatacatttgaaaattttaaagtatttttgttcttttttaaaaactacgaacatatccttttatgcaggaaccccaaaagtctacattttaacaacccacattttaaaaaacttttcagcagcttttagagtcagtatttcattagtctgtaatagttaaattcatatgacataatgacataaaatataaatttgttctttgtgtcatgacttgataaatatatgaatatagcagtgaaaaatttttttaatcattgaatttatgtttgtactcatggctttgatatttcatcccacatcattatatgctttttctttttcttttttttttttctttttgagatggcgtctcactctgttgcccaggccggagtgcagtggcacaatcctggctccctgtaacctctgccttccaagttcaagcaattctcctgcctcagcctcctgagtagctgggattactggcgcgtgccaccacgcttggctaatttttgtattttttagttgagacaggctttcaccatattggccaggctggtcttgaactcctgacctcaagtgatccacctgcctcagcctcccagaatgccgggattacaggcatgagccaccgcacccggctgctttttcttaagcaacatgagttaaatgtgtaaccagtttggggaatttgattatgttcgcaaaaactgacattatcaaacctttatatattagtctacatgatattatctaatcgaaaactacattataactgtctagtcaatactggacacatttcagatttcaagattagaagcaaggagttcaatcttaaaattttaaaatttacatgacttgttgagtaattcgatatcagaaaatttcaccttccatttcaaaatttgaacgaagaatggtagtctaaaagattaaagccaaaagtgtttgttttgttttgttttcgtttttttttgttgttgttttgagacagagtcttgctcttgcccaggctggagtgcagtggtgcgatcttggctcgctgcagcctccacctcccgggttcaagcagttctgccacagccttccgagtagctgggactacaggcgcccaacacagctggctaatttttgtattttgagtagagacggggtttcaccatgttggccaggctggtctcaaactcctgacctcagatgatccacccaccttggcctcccaaagtgctgggattacaggtgtgaggcactgcacccggcctgaagccaaaagtttattcatggaatttataatacagtgtgtatttggatgtagagatccctgttactgtttttaaactatggattaagagttaatctctttgagtaacagtcttagcattctcttttgaacttttttttttttaatttctcagggagagtgttattgggaaacctaactacacaggctgaaaagatacataagataaaaatgaaatatttttaaacaaacatctttgtaaccaccacccagggcaagacagacattgccagcatcccagaagcctcccaccacctatattttcccatcacaactatcaccatcttaatttaagctagatataaatgttcttctgacatttatagttttaccatataagtttacatctctaaataatagagtttaattttgcccatttttaactttatgtaaataggattgtgttgtatatattttatttttagcttttattgtttcataatattccatcatgaatataacacaagtttattccttctgccattgttttggatattgcatttagattgtttgcagtttggggctattataaacaatgcttttatgaacatttctgtttaagtgcactggtgcatgtttatttcgttttcttgagattatatacttagaatttgaattgcaagaacatggggaatgttggtctttatcaggtaatgccaggtagtttttcaaagtagttgtttagtggtttttacttcatttattagtatgtaagagttcttgtttcatatcccttaccaacaaccgtacgtggtatcatatatttcaattctagccaatcctggtgggtatgtagttgtatttagttttaatcatttccctcattactaaatggggctgaccagcttttcatatctgggtgtttggatttcatttttcataaaatgcctttgaaatcttttccttttttaaatcgaaacacgtctttttctagagttctgtattctgaatatatctccattgttggatgtatatattgcaaacattttttccatttagtagtttctttaaattaacagaagttcttcattttaatgtaaacatgttcatcagttttttatggctagtgtttctttttttaaaacatcatagagatactttgattatctttaaacctttttgtgctttgctttttcacattgacgtttataatgcatctgaaattgattttgtgtacaatgtgagatattcagagctttatatttagtaagggattcacttggtttatattgtccatattataatttagggcttggatattataatttaaatatatctggaactataaactactcttgaaatttttggctatttacatttgatgtggtatataattagggtaaccatatggcctagtttgccctggtggaaagtccttgtttgtgcctgctctggcataattattaaaaacatcccggctgggcagggtgactcaggcctgtaatcccaacatttccaaaaggtcaaggccggggtattgcttgagcccaggagttcaaaaccagcctcggcaatacagggagactccatttctacaaaaaattttaaaaagtgcattagccaagcatggtggcatgcatgtctgtcgtcccagccacttgggaggctgaggcagggggattgcttgagcccaagaggagctgtgatcatgccactgcactccagcctgaaacatagaacaagaccttgtcttaaaaaataacaatgatagcctgtaatcccagcacttcaggaagctgaggcaggcgaatcacctgaagtcagaagctcgagaccagtctggccaacatggcgaaaccccgtctctactaaaaatacaaaaattatctgggcgtgctggtgcatgtctgtaatcccagctacttgagaggctgaggcaggagaattgcttgaacctgaaaggcggaggttagagtgagccaagatcacaccactgtactctagcctgggcaacagagcgagactctgtctcaaaaaaaaaaaaaacacaaaataataataataatctgttttctcttttgaaaatgtttcagtgtggataagttatcacaccacataatcaaaagcctaattgcagaggtgctgtgaaatggtcgatgtgccttattttctgctagagatgtcacagactagctttagttctagaaagtgaaacaggtaagtttgaggggctttgatcctcggaacctaagcatatgtcaagaagtcataaaggcaacctagaaaggctttgatgtcaatctgctatgtatgtttatagatgatctgtgttgcagtttgtttctgcagtttgttgcagtttgtagtctgtgtcacagctctgaatttattttcttctcagcactgatcatgacttacacttaatcttctttgcttatttgcatatgtgtttattgtctgtcttcaccttccccttcacctccagactctgagctcctggtatgaaaggttgtttagttagtgagtaaatggaaatgatttagcattttagcttattgttcttgtagaagtatcttgggtatacctccaaataatgcttttccatgttcacaattgcatttccctataaaattaaattatcctgcctcacattaagaaatcttgaagaatttcagtgagtagggatgcaagaggatgaaatctagtgacataattaacattattggggaggtaaactctttgtgactcaagctcaattataattttcatttaaagtttaaaggaagcctccattcagggtgtaggaagaaattacacagtggtgacatgtatgaatattttatggaatagttccagttgtgtttgcacctacgtctataagtgagtaggatgcctaaataggctaaaatgaatgaaattcttataaaaaataaattcttacatttagttagcttacctggataatcattcaaatggaaaccaggttgctactgcactgggaaaagagactttatgaagaacgattatataagccacttgcctttaaaataagttgttcttaaaatcaagagattggtggaagaatagaaaaacaagtaaattgttaacagatttctttaatcatctgctaagtctggctcattggcataatttatctacttcttgatgttagtcacatagtcataaactattaccttattggagagagtggaagagctttgtgtgatggataaaatacttgcggggtgctttatttgatttcttgcattacttggggatctaaatctagcaattcacaaaattactatctaaaatgacaaagatctagtgaaacttcaagccacagtttctttttgttgccctatttagtgatgttgccagtacttggagccttggaaacagtttattattgttacatagtccgcagaaatacttggtaattctgggagtctgaagtcaggtgccagaaactgttcattttctagtaggggtaagtaaggtaagccatgattttctaagtcggaagtaaagaaaacagcataaaactgaagaaaaaaaatagtagaaggaaggaagtaggaagaaaaaagaaatcttatctgtgcatgatacatagcaggagttttgtatttaactcagtgccacagtaataatagcagtaactacagatagtttaacttgaatttaattattccgtgctagaagatgcttgctatagaaacaatttgtctttctctcatgatgctataaaataatatattaattagctgttttaaaaactagataccattgaagtaaattttgttgttgttgttttgagacaagagtctcactctgttgcccaggctggagtgcagtggcacgatcacagccttgacctccctgggctcaggtaatcctcctgcctcagcctcccaagtagctgggaccacaggcacacaccaccacacccagctaattttctgttttttgtagatacagggttttgccatgctgcccaggtcggtctctaactcctgggctcaagtgatctgcctgccttggcctcccaaagtgctgggattacaggtgtgagccacagtgtctggcttgaagtaagttttttagtggacaaagtgtgagttggtctgtaaaataatttattcccaagggccttattctagttttgtagggttttttgtttgtttgtttttttctggaagaaaatgcgacccaaaatgccagttggaatacttagcagctttttggtcttggacaagttatttaaccttagctttaacttcttcatcttttcaatagggatggataataatgcccatctttcagagtcattctgataattaaatgaggtgatataaaagaagtaactagtttaatgttggtgcttaatagagaatagctgtcccatgttatttcccaccacgatctccctctctgtctaggtgctcagtctctctagtagcccaactcagtcagtcattcacacctactgtagtctactgtcatcttactgcctttcactgtcctctcattcccctcataactttacttccttctttatcctgcttcaactccatgagcaaccacgacagtcagtacacattccctcagcccccaccccattcccctcttgctgtcttatacaagaaatcacaaccctgattatatcaacacagatgtgctgaccagcctcactctaaatttatgttcgctagcctccgcagtcatggtcacttcctagcagtcacactatacttccataatccatttcacttttctacatggctattccattcattttcctcaagcctccaacacctcccccatattcactttcagccccttaaccgtgctttctatagcagttaactgagaaaagaacagcaaacgaaagataattttgataaacttacccctcacatacccagttacctgcatctgttccccagacttctatgtttttttctgatcaatatggataaactgttcttatttctgtctaagaccacccttccacttgtgcagcatttgtcccctcttggtgattcaagaacattgctccagcagttctctactctcctcagtttttccttccctaacgtatctttctgtctgcttacagataggcagttatttcttctaccttaagaacaaccaaaaaaccccactgtacttgaactgaatttcctcttttctaatgattaccccatttctatccttccctttatagcgaaaccccttgaagaagttgtctacaccactggtgttcattcatttttgagccctgtttactaaggtttttattcctacatatgaagttttcttatcaaaattaccaaagatttccatgttaccaaatccagtagttagttcttagtctcattctacttcaccagtcagcattacgtggtacagttagtctgttctctgtgaagcattttcttaacttgatcgtatgccatttttttcctcatatctcactggttacctctcaatctccttggctgattgaacctgtaagccgccaaatgttgggagagctccagggctcagttatctccccttttctctctgtctgttaacatttatttaatcatctgcattcttttgatgatctcatccatctagttcctggtttcaaatactacctgtatatcactgactcctatctctagcctgaatttctcctctgaactcctgacttgtatatccattgcctctttaacatctctacttgtagggaagtctgctagaatctcaattcagcatgctccaaacctgttcctccatcagccttccccatctaatcaaatgacagctctattctagttggtaagaccaaaacaccttggagccatccttaattcctctctctctgtctcacctcatgtgatccgaacctatcagctctgctttcaaactagatgcagaatttgacctctgaccacccctactaccctggtccattatctctcactagtctattcagagatactcagattcctgtttcttgtttccaatattgacctctcagttgattctttctcctcctcccaattttacttgagtgaatctttgtaattaaaaaataaaatatatgggaaatgtaggtgacaaattttcttagtgaacctatgttttcttgtgcttgactggttggttggctatgtatttccaaattaagagtcttttttctgtggaactttgaagttactgctttttgttcttctaatattctggggttgctgatgccagtctgactctcagtcacttttctctctggaagcttttatttagaattctctattcctggaattcacaaatgtgatcacactggtttgttgttgtttgtttgttttttggtttggtttgatttttcctctgagtgtttctctgtggaccttgtgaatctgaagagtcaactctcggccgggcgcggtggctcatgcctgtaatcctaacactttgggaggccaaggcgggcagatcacaaggtcaggagattgagaccatcctggctaacatggtgaaaccccgtctctactaaaaatacaaaaaaaaaaaaaaaagccaagtgtggtggcaggcacctgtagtcccagctcttagggaggctgaggcaggagaatggtgtgaacccgggaggcggagcttgcagtgagccaagattataccagtgcactccagcctaagcgacagtgagactccatctcaaaaaaaaaaaaaaagagtcaactctctttaaatctaagaaatccattcattctctctacctctgacacgccctccctcccctctccccctcctctttctagctccatctcagataatttctatcttgcctcctgctccccagccttgttattgttgtttttaattcctcatggatgcgtttatcctccaccctgctttttcactcttatatcatattttcatatctgtctcttggttttatcatttggagattaaaatataaaaacagccataaggaagaatgcccaactgaaagcagcttagagagtcaacattaaatttaaaccattgggtaaagatagcaaactggacatgcttttacttttccttcctgttgataaatcctatcaaaactacgtgagagggacttttaaaaaatacataaacccggccgggcgcagtggctcacgcctgtaatcccagcactttgggaggccgaggcgggcggattacgaggtcaggagttcgagatcagcctgaccaacatggtgaaaccccgtctctactaaaaatacaaaaattagccagtcgtggtgttgtgcacctgtaatcccagctacttgggaagctggggcaggagaatcgcttgaacccaggaggcagaggttacagtgagctgagatcgtgctattgcactccagtctgggtgacagagcgagttcgtctcaaaaaaaaaataaataaataaataaacccataaaggacaaaacagatttggaaaggagacaacatcaacacagtttggaaggctgaaaagcaaatagatgagtttaaatgacttagcaaagttgagagccgcaacctaagtagtcagtgggaaaagccaagatgtaacttgactttcaccccaaactcctaaaaggctcaggagttgacatcaacaggcacaatggaaactagaagattgaagtaattgggatgaagggtgtaagttttgggttataagtttaacttattaacttttaactttattgggtataagttacaatactataaaattcacccactgtaagtgtgcggtcccgtgaaagttgtgtatccatcaccacagtccagttttctaacaattccatcaactcaagaagcttctttgttgatgtttagtcagtagctgcctacgacccccagtcctaggcaacctctgatctactttcttttctagactttcctttgctttttttttttttttttgagacggagttttacagttgtcacccaggctggagtgcaatggcgcaatcttggctcactgcagcttctgcctcccgggttcaagtgattctcctacctcagcctcctgagtagctgggatgacaggcatgcaccaccatgccagctaatttttgtatttttaagagacggggtttcaccatgttggccaggctggtctcgaactcctgacctcaggtgatccacctgcctcggccttccaaagtgctggaattataggcatgagccactgcgcccagcctttcctttgcttttaatatgtaaattattaaattgatttcctaatattaaaacattcttgcatttttagaaaccttaaatttcaaacaactgtatttctctatatcaattatcaattggagtaattagccattatctataatagattcattacatggagttcatggtagatttcagggagtcttgatcccctgaagttataagcaatttttatttacatacagaaacatttggggagagggttcatagatgtctttaattttccaagacccagataaatacaagctacctttgcttatgcctaagttaaaagttttaacatatcttttcacttttctccctttgtcccattttccaggttttatctaatttggggtttaggttacagattgttattattacattgcttctatttttagaatcccttaagagcagttttattagcaatgttgacttagataaaactgagggggcttttttgttttttgtttttgtttttcgtcagagacaaggttcttgaggacacaacatttaagctggggcctgacagatgagttagaattagccacatgtagaggctatctaggaagatgttaaggctatctgttatgttcagttacataagagagatcctttgtaaatgtgttttgctttgtaataaaccttctaaggagccagtattgttttgttattacatcactctctaaaatttcaaattgcctttttggttttataaggacaagatgggctcttaacaagatggctttggggttttttcagtcgaagatgatgtaacctctagagttaagtgcgaagaagttgattttgagaatatattgcagaaggtgcaaggaacgtcatctgggttatgacctctggaagtggaggtagttttttgtcattgggtcgccagtgcttggcatgtgatctgtgaggtgatcgagaatattgcagacacaagggcaggagtaatgcctctgttaggggtgttaagttcgtagtgggttcaggaagagatggtggaggctgagggacagatgttttcattcagtgcagtaatatttgctaacaggaagaaagtagtgtgggtaagggtgaagaaggggccagagaagagagtgcagatgtgcaaaaagtgagagtttgtggaagcaggccgtgatgtggttccaagagctggactgtcgaatcttatttttgtaaagctctgctcttaagtaaaaaacccagagtcacctttctaccatgctaccttcagggcctgagcaagagtactgcgttgtagaagaggtggtgctttttagtatttaagtaattaaaccttccttgttgtattaaatccatatataataccttattccaacatatctcagatagtttctgtatctcagatagtttcagcaagagtttgtgtatggcaccgaatggacaagagctgtacatatatataaatgtcagaaagagaagaaaaatactaactgtaactttttggtttcctggtttgctgcttttgcatgtagactgttcttaaatatgctgaggttgggtttgtttttcccactttcccattctatcaacatcagttgttatttactctaaacaatcattctttcattttatcctaagtgagtttcttttataatttaattcagttcccttggtattaaacactgttcagtactttggaagtagcttacttaatagctttttctgctgtgtgatttattcaagaaatattcaaatgtcagctatatgtagagcactgtgttagattctgtgggagttgcaaagatgatctagatacagatctttctccagatctttaaattctagaagggtagtatagacagaatgatagaatgctgtgtggttttcaaaggaagaacagattatttcagcccaggtggagttgggtgatggctaattttatgtgccaacttgactgggccacagtgcctagatatttgatcaaatattttcgatgtttctgtttaagtattttttgtatgagattaacatttaagttggtagattgtgagtagcctccatctgtgggtgggcctcatccagtcagtggaaggcctttaatagaacaaagactgacccctgagcaaggagttctgccagcctgctctgcagattttggatttaccaggcctccttaatcccttgggccaattccttaagtctctttctgtgtttgtatatgcacatctgatttattctgtttctctataaaacctgaccgatacctggaatcttcaagttgaaatttaggatagggggagagagaaaaatagaggacagaaaacctgatctgtgaactgagaataatgagctttgttagaatttaagtttgagtatgctgggaccaggtcttggagctgatacaggactgaagagttttaactttacatcataaatcttattctaagttttcatttgaacctggttttagtttcttaactttgtaagcgtcttttggatatttcagtgtttcatttgttgctctcaaattttggtattcaacagactcgtttctttttcttttcagttaacattagagtctaatttacaatttttagttcatgtcaaaaaaaagttcaggccgggtgtggtggctcacacctgtcatcccaactctttgggagtccaaggcgggcagatcataaggtcaggagatcgagaccatcctggccaacatggtgaaacccagtctctaatttaaaaaaaaaaaaatacaaacattagcctgggcgtagtggtgcacacctgtagttccagttactcaggaggctgaggcaggagaattacttgaacccaggaagcagaggttgcggtgagacgagatcgcgccactgcactccagcctaagcaacagaccaagactcggtctcaaaaaaaaaaaaaaagttcaggctttgggaaatttttttttttttcttttgagacagtcttactctgttgctgaggctgtagtgtagtggtgtgatcataactcactgcaacctccgcttctggggttcaggcaattctcatgcctcagcctcccaagtagctgggattacaggcgtgtgccaccacaaccggctaatttttgtttttgttttttcttaaattagagacagaggtttcaccatgttggctaggctgggctcaaactcccaacctcaggtgatctgcccaccttgccctcccaaagcgctgagactacaagtgtgagccaccatgcccagcctggaaaatgttaatagtgtcatttggagggtactagcttcacttaactatgtattttaagtatataatgtttatcatgcttaaatttagaacatttttggtattttataatggaggtattgtattgggaagtttgtcactacaacttatttctctggccttgtactatgattttatatacaagtattatatacactaacaaccagtttggcattaggatgatgtttgagcttaactaaatctggagactggattagatgagtgattttgccaaataatttgaccctgttttgttgttgttgttgttgtttgtttttttaatgcatgtgatgcatttctattaataaatctttggtgttatttcaagctagaaatataaaattgattctattttaagactaataaaattattagctgggcatcatggctcacacctgtatgtaattccagcactttgggaggctgtggtggatggatcgcttgagcccaggagttggagaccaacctgggcaacatggcgaaatcctatctctacaaaaaatacaaaaattagccaggtgtagtgtgtgtgcctgtagttctagctactcaagagactgaggtgggaggatagcttgagcttgggaggtaaaagttgcagtgagccgagatggcaccactgccctccaacctggactggatgacagagaagggacgctgtctcaaaaaaagaaagaaaaaattattagggcaatgtagcagcatgatgaagtttaaaatgtagaggacaaccacccctagtttccccattctccccaactacttttgtcattctctgtattctcttgtaggctgtatttgtaggtgtgtgcgcacatgtgtgtttgaagttgaaaattcacattacatgcaattaaccattatattgtgtacaattcagtggcacttagtgtagtcacagtgttgtgcaactaccacctctccttagtttcaaaactttccatcatcctactaaaatacccctaggcattaagtaatccctcttcatttcccccataccctgttgaccactaacctgctttctgtctccatggtttttcctatttcggatatattatgtaaaaggaatcatacactgtgtgacgttttgtgtctagcttcttttactcagcataatgctttcacgcttcactcttgatgtaacatgtatcagcattgtggtttttttatggctgaataatatttcattacatgtatttttaaatatatatatcatatatataagatatatagagatcataatttgtcttttgttgatgggcatttgggttgtttctaccatttggctgttttgaataatgctgatataaacatttgtatacaagtttctgtgtgaacataatataatctctggtactttgttttggcagccctagcaaactatattgtgtgctttatttccagtgtagtgcttagcccacttgctggactgtaacttccctgagggtggggacataaatataatgcctgcctaatattacttaaatattctaagcctgctgaatcactacattttcgttaattcatgataatccccaaaatatcccagaatcagatcagtatctattcagctacataatactacttaatagtagtagtatggcttactttgaagcctaatgctgtgtcagcttcagagattaagatgtcaggaaaccaatagtagtacttattagaggcattgcaagtggtatttagtgtttagtggaccttcaaatccaattcagtgatatcaaatccaagtaagcaaatagactgagctccttgagaataggaactggtttccctagcatctagcatagtacctgggacaggtggtgcccagcaagtatttgaaagaaatgggatgaaatgcaatgacatacggcacctatgttcagcttaaaactccagtcacattacctatgggtatttacattggaatgtgtagttgctgtagaatcccaaaatgaatactagaataacaatgttctttctcaaagtactacgtgttatgaatgaaaaaaaaaatgattagaacatagttcagattttgccagccagacaaaggcatttgtgctgtaatctgaggtatgccttcctgcactaagaggaacagggtttatgggaaaactaggattaggagcagaccatttgaaatctgtgcatctttgtaatttaagcactaatgtaaacctaataaaaagatagtagtgtgcttaaagataagttaaaatttttaaacaaataatttggtaaatttagaactttccctttaaaaacagtaaaggtgaccagaagtggtggcactactcagggctagctgtatttaactgttgttacctgcaaatgcaaaaactaaataacattttaggaaaaattggaaatgaaccaatgtgatttctgaatgtactgacataattcccttatttactgattgcatatgagctaatgtatgtgttgtagtagaatagttccagtagttctttaccttttctgtgcttatcatgcctccttcctttctactgttaatgttcaagttttaatcttccagacttctcatttgttctgtaacagtatcttctagccacgtgtgcccttctaatctctcttgtggaatttgttcttcacaatactacaagaattctattgcattgaaaaccccaaatcttattaagccagcctccatcattagagcatgtttctcaaactcttggtgtgtgcaaatcattcttattctgtgatttctattttcatgctttttcagtttgcttcatttgccatatgatagaggttttcttcagaccatattttggaaagtatgctcttagttttaaattctactatgggttatttccaagacccatagtagaatttaacaaattctttcaaataaaaaattttaaagccttcgcttattatcaactagccaaaaaaaaaaaaagtgtatcaagtgactcctacttgacatgatgagagatgaaagtgtaagtttagatactactactgtctgttgagtttcctctctctccattcattttaatctcccaatttttgttaaaatgttgtgatatactgttcttagtttgttacactttgtaactttgtagtcttttccagaactatttctattctagaaccaaagtaaattgtcatgtagacttctgtgttgaaatgaatttattgtccatttcttatctttagataacactttttttgagttattttgatataccaaagcataagtctctgtggcttgtagtggtctgttttttgtttgtttgttttgtttttttctggaaatacagtgaaagcttttgatgaaatttaggccttcatgttaagacatttctattctgttatatctttaattatatttttcttattcttttgtctatctcaggggcagcagttaactgttggatcttcataactatcatcttctctctaacctttttaatgctgtagtactttttcatgacatcttgtttaccttttctcaaaattattctcttctagtgatttggttttgctgcattgactgttgttgcatttattagttatgctgttttatttatcttgtgtaattttctttccttaattctgcatgctaccctttcaatgttgttttgatcataaaagtctatgctatctgtttttcttgtgaatgtcgaagcagttgtttcagaaaatttcttctattttctgtgataaatactaatactgaatgtatttcatctaccttttgaagactgtgtcctatcagggcaaactgctggtaatggaaaaaaaaacaaaataagtaaatgaagaccgtgtcctctttgattcttctcttcttctttactgccttttttctttattttgatacacctttttctttccttccatcattgcctccctcctttccctcttttcttcccttctttccatctttcctgtaaaatttttcttgattccctgatttttctactctttttttctttagtaggtcctttcagtacctgctgcttgccaaaacgtgaaatgcagattctctttttacttgactctgaattcacctggctaagctctgttaggccttaggaagcttaatagagcttctctaattttgtagaagaagggcctttgactttttccctctctgcttcaggatgatctcatctgctactttggaagcatgagactttatttgttttgatggtactgaggttaggggtgagattgatttatttgtaattagtcctttctcctccttatccttccttttggataaaggtaaaaatataaaatcctcctgcctgctaaagtactgtttggccatcagagaaagggagcttcaggtagggcattccgcagtccctgtccccatcttagcaagttgaagatgctagtcaaaatttctctggggggcaggagagggcagaggatacttacgtatggattctggggttggtctttcagtttcaactaactcattctgtacctgaatgatactatttaataaaatttcgtggtatgagtttgagaacttgtcatgattttagggatattttaacttcctttttgtttctttcctttagttttagggaaggatcttctgccaaactacctgtgccactgtctttcctggaagtctcataagtactagaaagaacttttagaataagagtgtaggacattatttacactgaaataacattctttttgttgtttttttttttttttttttttttggagtcagattgtcattctgtcacccaggctggagtgcaggagcgccatcttggctcactgcaacttctgcctcttgagttcagccaatcctcccgcctcagccacctgagcagctaggactacaggtgcatgccaacatgcccagctaatgattttttgtatttttagtagagatggggtttcaccattttgttgaggccggtgtcaaactcctgacctcaagtgatctgcccaccttggcctcccaaagtgctgggattgcaggcatgaggcgctgcatcagttctgcaaaaaaaaaaaaaaaaaaaaaaaaaaaaaaaaaaagcgtatgcattaaaaatactaagggggccaggcgcggtagctcacgcctgtgatgccagcactttgggaagccgaagcggatggatcacttgaggtcaggagttctagaccagtctggccaacatagtgaaaccccatctccgctaaaaaaaaatacaaaaattagctgcgcatggtggcacacgcctgtaatcccagctgctcaggaggctgaggcaggagagtcgcttgaacccaagaggcagaggttacagtgagccaagattgcgtcactgcactccagctggggcaacagaatgaaactccatctcaaaaaaaaagaaaaaaaatagaaatgttaaggggtttacttcctttagggtactctttaaatgaaatatgatgtttcatattctctatttggaacttctgtatggatgcagacattttcagaaatctcccaggacaatgaacctgaaacttatgtatttataagaaacttggggatttggttattttatttacttattttgaaatagggtcttgctgtgtcacccaggctgcagtgcagccacgcttcagtacagcctcaatctcccaggctcaagcgatcctcatacctcagcctccttatagctgggactacaggcatgcactaccacacctggctaatttttaaaaatgtttatttttttgtagagacagaacatcactgtgttgctagggctggtctcaaactcctgggctcaagcagtcctcccaccttggcctcccatagtgctgggattacaggcatgagccactgtgcctagccagaaattggcttaaaatgcagatttttggaccctgtccccagcaaaaagattcggtagaaatctttattcgtagccagtttactgtgttgcaggtggtccccagtttaactttgagtaatgctgtcttcattgttaaaataatcagatttaattatatggtagatattttaggtaactagggtatttcaagctgtcccatggggctgagtagctggcagctgcttgacttggcttctagaggacttactgctcagcaaggtaaatgttattaataccttcattgctctctgtgtcccaaaggtcaatacccaaactttgagattttgtagactggaggaatctttgtctcccactccttccccaagaaagacatgggttgctaatttttattttgtcgaatgaggacattaaaaataagttaaccgtgagccaggcacagtggcttaggcctttcatcccagcacattgagaggctaaagcaggaagatcacttgaggccaggagttcaagaccagcctgtgcaaaatagcaagacctcatctctactaaaaaataaaaaaagttagctgggcttagtggcacatgcctgtggtcccagctacgtgggaggttgagatagaaggatcgcctgagcccgggaagctgaggctgcaggaagccatgaccacaccactgcactccagcctaggggacagagacccagtctcatcaataaataaataatgaaaggacattttaacaccccactacaaccactaaagatacaaataaataaaaatataagaggaacacaacctcataatacagatagtcttttatattgcatatatttaacttcgggcaaaagccactctattttcctctttaaaaaaacttttttagctatagattaatgaatactttctcagacatttcagaactactgcttagtacttgaaatacaacatttagaatctggggtactacctgaatgtgatgagtagtcacacatctcatatcctttgttttcttgccagttcgatcctttggtacagaagacagaccgacagatcgtccaataccacctcgagatgaagtctttgaatacattatattccgtgggagtgacattaaagaccttactgtttgtgagccaccaaaaccacagtgttctttgcctcaagacccagctattgttcaggtaactgatggtaaatttgtcttggagtacaggtaaactccgcacagggttagccttggcttttttctctctagttgaatgttcatgtagcttatcatttccaagttactgggatacctgaaattactggataatgttctcatctaggtttttctctttgtatcataaattagaactaaggtaagaaacagctgaggaatttattatgaaatattttctaatttcaacaacaattaccatagctaacattgaaggctactctgtagaagtgctgtgcatataagataccctctgaggttggtactataattattctcacttttaacaagtgaggaagttcagatggagccacaatttgaacagatccaggcagcctgcttcagaatctaggatccgtgctaccatgctattgagatatggtttatattgcaaaccaaggcaataacagctactcttaggtaagattattaggcttaatggggaaaaaaaagcaaaatcacattgttctgcatatgttataatatgcagtgttggtttttgttttgtttttctttttctttttttttttttttgacagagtcgttggagtacagtggcgtgaactcggctcactacaacctccgcctcccaggttcaagtgattcttctgcctcagcctcctgagtagctgggattacaggcatgcaccaccacacccggctaattcttgtatttttagtagagatgaggtttcaccatgttggccagcctggtctcaaactactgacctcaggtgatccgcccacctcagcctcccaaagtgctgggattacaggcatgagccactgtgcctggcctgcaatgttatataataagaaaacacaaacatcaatgtattttaacatatttagatcagctcttaaatctcccaatttaagctttttaataaggaattgtaaattttgttgcagcataagctggagaaattctctactctcatctacccctacccttgttaagtcttattttggtgaaaggaagcctgaagtggaaatgtgaatctctttaaatggagaaggaagagacacattcttaatagagatagctccctacaccaaacactggagttaccttactgtctcttttatatggcttttgataattctccaggaaaccagttatttgagtaatcggttttatggaaggagaaaaactaagagagcgcatatgaaaatggtgttgaataacttcttccaatcatcataaacttctacttgatctccttattcattcattcagtagtatttacagagtatctggcatgtgcttaacactagtggtgaacacacagaaaaggtcctgccatcagtgagtgtatgtcctggtagcctttaatacacttcatgtttatattatgaaacagtttatagtaagataatatatgaagtatacatgtattaatatatgttatatattttatatgctttaggtttaagttaaagtttttataaaatgttcctcagcttaatgtaactataagtaaaaatgtaaatggttttatgtgggatatgtttgtttctacgtctgtgaatttaatagtaggcctcaaatgattgaaaataagagtaaaatcatacgtgagatttatatcaacatcagactaaaactcattattactaagtgtgatttttctcatatttttctttaagcaaagttactttacttaagtaactttaattctttcctcaatctataaaactcttaattcaaatggggagtttattgtagaaaaaagtatttgtaagtcacattgagtataattggcacattatagacagatactgaaatcaaaaggttgtttggctattttaatattaagtgcatattgtaattcattttatatctagtagttataatttaatagttttcttaaaagtaaaaatctggaattttttttttcgttatatacatgttgcttagagcttggaaacataactcatgattttccttcagtcctcactaggctcatcgacttcttcattccagtccatgggttcttatggacctttcggcaggatgcccacatacagtcagttcagtccgagttccttagttgggcagcagtttggtgctgttggtgttggtatgttttctttttcttttctttttttgtttttgtattcttcctttctttaccacaaaggtatagaaactcaacaccaactattagaaatgttgtttgatgttccttttgtaactttgttttatggtattcagaacacattttgatgatatcttaaagcctttattgatattagtgggtttttaaaagtcagctttcacagagtaacatttttttttactaggtaaaaaaaaaatggatatactaggtatatccaatatctaccaaatctaccaaattggatatactaggtatatccaatatctaccaaatcttattggtaattggttttgttttgttttttttaaagacaaagtctcactctgtcactcaggctggagtccagtggcactatcttggctcactacaacttccacctcgtgggtttaagcaattctcgtgcctcagcctcccagatagctgagattacgatatgcatcaccacacccagctaatttttgtattttcagtagaggtggagtttcactgtgttggccaggcaggtcttgaactcctgacctcaggtgatccacctgcttcggcctcccaaagtgctaggattacaggtgtgagccactgcgcctggcctggattttaattaataaatttttctttttaatttctttttctttttttttttttttttttttttctgaggcagagtcttgctctgttgcccaggctagagtgcagtggcatgatctccgctcactgcaacctccacctcccaggcttaagcagtgctcctgcctcagcctcctgagtagctgggattacaggtgtgcgccaccactcccagccaatttttttgtatttttagtagagatggggtttcaccatgttggccaagctggtctcgaactcctgacctcaagtgatccacccacctcagcctcccgaagtgctgggattacaggcgtgagccaccaagcccggcctaaaacatttaaaaatgtttattttaaacatacataagacatgcacacataaagatacgcatagcatgattgagggcttggtgttttgtttctgtaacactggatttgaaacgaaactataatgagaatgtatagcagggctgggcgaatgacaggcttgcttatgactggagggtcaagggctattgagtgcaaaagctggatgtaatcagattagctcagtgttttgtttttatagctatgcattttagcgtttaaaccatggtaaagaacagcttttaaaaaaaaatcgcttctcagccttttggctaagctcaagtgtaaaaaaaaaaaaacagctttaaatctcaagcttttgcccctaatcttttaaaatttcattgaaataattatcagtttactgtttcactgcaccacaaatttagtttcaggtgtatcttgaaactcattgatatgctaataagttttattaaaattgttaaattccttcctgtgaatatactttttatacagatgtgacttaagtatttaaatgttttacttattcacaaaataacaaagaatggcaaaaaaaaagcaaactaaaactgaatgagctgggcgcggtggctcacgcctgtaatcccagcactttgggaggctgtgggcggatcacctgaagtcaggagttcaagaccagcctgaccaacatggagaaaccccatctctactaaaaatacaaaattagctggacgtggtggtggtgcatgcctgtaatcccggctactagggaggctgaggtaggagaatcgcttgaacctgtgaggcagaggttgcagtgagctgagatcgtgccattgcactccagtctaggccacaacagcaaaactccgtctaaaaataaataaataaataaaactgaatgaatataaacagaaaccacagatgctattacatattaaattgataatataaccacacagagggctgggtgcggtggcttacgcctgtaatcccagcactttgggaggccaaggcgtgtggatcacgaggtcaggagatcgagaccatcctggctaacacggtgaaactccgtctctactaaaaatacaaaaaaattagccgggcgtggtggtgggcgcctgtagttccagctactcgggaggctgaggcaggagcatggcgtgaacccaggaggcggagcttgcggtgagccaagatcgtaccactgcactccagcctgggcgacagagtgagactccgtctcaataaaacaacaaaaaaaaccacacagaggaaaaaataattcaggtaacttttacactcttagtaggatatattctaacaacaaatagaactactaagaaaacttgactttgatttgtattattggtgttattatttatttatttatttatttattttgagataagatctggctctcacccaggctggagtgcagtggcacgatcccggctcattgcaacctccgcctcccaggctcaagccatcctcccacctcaacctcccgagtagctgggattataggcatgcaccaccactcccggctagatttttcttttgtattttttgtggagacagggtttccccatattttccaggctggtctcaaacttgtgaccttgagtgatccgcccatcttggcctccaaaagtgttgggattacaggtgtgagccactgcacccagccaggtgttaattcttaaactgttttgtatgtattataggaaagggcaaatgaataaaatacttatgttgggaaatagtgtttttaccatggagacggaagatataaatatggaatgggaaaggtgagaaagaaccctgtggtgctgaatgtaaatagatggtatgtgtatggactcattttttaaaaactggttatttcctagctctgttcgtagaaaggacctagaaacaatggaaaccccgtagcaagggacacatgtagactcagctcttagtttctaaataccactccccactaaaaggaacaagggcccattgaaaaacaaaggaaaagacatacttttttcatataaaaatgcctgctaataagtagaagcagtggtagataaagaaaattgccattttctaatctcagtataataattagcgaggattatcattagatgctgaagtcattgggtgaaaggtgttaggacagcatattaaggtggtcttaaagtatcatcccacaatttacaaagggggaaaaatgtacccttgtaacacagacatctggtggttaccaacttcgttgagtgctcaagtttagcattgccatgaacaattatgtgtctcctgttgtgatgattggggtggggggcaaaacataatatcacctttgtggggttcttgctgaaaatacagaatctaattttgaagaaatgggcttatatatccagaaggtgggttgttttgcgagacagttatccacactcttcaaaagattcaatattacaaagaatggagagaggcagcagaactgctttaggctggcaaagactgaagagacataacatccaaatgtaatatagaatcgaatactgggcttttaaaaagttggcgtgtttgtttcctgcaggggagaaaaagaaaacttaaaaagttggtgtgaagaacattttagggactactaaggaacttttgagtatggactaattgttggattttgttattattgttaattttctggttaatcatatgggaaagtgtttttgtttgggggaggtggttttgaagtatttaaaagtaaaagggccaaattgattttagcctctctaaacaaaagaaaaatgtgtatattaaggtataaagatggagaaacagagtgggtttggttagatgttaacagttgatgagtctaggtgaggaatatattgatattctgtgtactccttcaattttaacataggtttgacatttttcataattaaaaattaattccttttagacttactttaggtgaaatagtgtaactttggtccataaatttccaaatccagtagtaagatcaatgttatttattcatgttaaatcaagatatactgtatgttaactgtaacttagaatcctttcctggggattcaagtaaggaatgattgcaaattgtattatcctttttgaggctcctttgactaaattaaatagttaactgactttgagatcatcattatacttcttatgttaccatgaagtttatgtaactaattatgttaaaaaatttgaacaggatcaagcacgtagtatctatatagtaactattgcttctgccattcttcaaggtttactttttaatcagagtattttgtggttgtgaaatgcttttataaatattttaatctaattttaatattattgtgggttgttggtttattacttgggtgtcacaaaagtagaagattttactggcattttccatgtcagtagagtaatttttgcagggtcagattatttttgattaattgatttccatattggttaggataatttgtggagtggctaattagaaaactagtgttagaagttaccaaatgaggaagaggaaagctgtggcattggtcaaggtgacagatgtttttcagaaaaggaattaacttaaatttagcttgttttttgagatggcgtcttgctctgtcacccaggctagagtgcagtggtgcgatctcagctcactgcagccccctcctcccgggttcaagcgagtctcctgcctcagcctcctgagtagctgcggttacaagcatgtgccaccacgcccagctaatttttgtatttttagtagagacagggtttcaccatgttggtcaggctggtctcaaactcctgacctcttgatccgcccgcctcagcctcccaaagtgctgggattacaggcgtgagccaccatgcccagccaaatttagcttttgttggcacaaagtaaaccacattttaagctaggcctcttttcatttttggttcctagtattctgattttaaaaggaaatttaaatgaatctggatcacagtattgctatttgatgagaaaatttttatatatttacgttttcgtgtgttattactattgctttttatttttatttatttattttttgagacagggtctctttctgtcatccaggctggagtacagtggcacaaccacaggtcgctgcagcctagacctcctgggctcaagcagtcctcccatctcaacctccctagtagctgggactacaggcatgtgccatcatgcccagctaatttttgtatttttggtaaacacagcatctcagcatgttatccaggctgatctcgaactcctgggttcagtctgcctgcctccgcctcccaaagtgttgggaaccaccatgcccacccttattattgctttttagtaagtttttttttttttttttttccatttggttggttggtttggtttttgttttgttttgttttgttttgtttttgagactgagtcctgctctgctgcccagcctggagtacaaagacgttagcactttgggaggccatggcaggaggattgcttgagctcaggagttggagaccagcctgggcaacatagctaaaccctggctctacaaaaaaaaaaaaattaggcaagcatggtggcacactcctgtaatcccagctgctccagaggctgaggtggggggattgcttgagcctgagaggtagaggttgcaatgaaccaagagcacgccactgcactccagcttgggaaacagagccagactgtgtctcaaaaaaaaaaaaaaaaatcttgcttatagtgaaaaacatacaaattaaatctacactgagacaccatttctcactatcagtttggcaaaaactcaaaagcttgattatatgcatactcttggcaagtatgtgaagaatatatactctcatacattgagaagaataatataccaggtagaattaaaggactcactctgttgctgcccaggctggagtgcagtggcgcatctccgctcactgcaagctccacctccctggttcacgccattctcctgcctcagcctccctagtagctgggactacagacgcccgccaccacgcccgggtaattttttgtattttttttagtagagacggggtttcaccgtgttagccaggatggtctcgatctcctgacctcgtgatccgcccgcctcggcctcccaaagtgctaggattacaggcgtgagccaccgcgcctggcggacttttcttaaaactgatgcaaaaataattcttatgtgtaagagattagatcattactggccttaatttctgaactcttggaaaaattaaacacctcacaataaatgaagcatcaaaacagtatttccctgtgttaccattgaacagtagcaagagcttactgctgcagttagaaaaaggattcatagaaacagtgaaaggtatagattgaccagctatctaaagtaattctatagcaaggattacagtgaagaaacatggagcaattagatgttttttctgttatatttactccagttgattgtttaagtctcataatcttatgtgccagatggaggagtattggctgaatagaccatcagtgggtacattttagttgattaaatagccaaaccatattggaggatggttctcttaggtctccagtgttttgtagagactaatttttaatcactgagtgatgaagccttgaagagatgcttacgaactttacagttagcataaagccaggggggtgtttcaaccattatggatgttaaactaaggattattaaagatcagaccaggcacagtggctcacgcctgtaatcccagcactttgggaggctgagacgagtgaatcatttgaggtcaggagttcaggatcagcctggccaacacagtgaaaccctgtctctactaaaaatacaaaaaaaatgagccgggcttggtggcgtgcgcctgtaatcccagctactcaggaggctgaggcaggagaatccctggaacccaggagatgaaggttgcagtgagttgaaatcatgccactgtactccagcctgagcaacagagcgagaccctgtctcaaaaaaaaaaaaaagaaagaaagattgttaaagatctactttggtaaaatgtgaaggaattaaacattccagttaaaaggcagagagtgtcagactgaatttaaaaaaaaaaaaaaaaagacaaggcccaactatattatgtttataagaaatgcactgaaagtgaaagaatagaaaaaggtataccatacaaacagcaataacaagaaaagtgtgtagcatacgttaatatcagacaaaggagcttaaagatcaggatttcttccagaggtaaaggttgggggggcgttcttcgtaaagataaggatcagttcatcaagaagatacaacagtcctaaatgtgtaacttttataaaacagtatacccaacaattgcagaatattgttttaagtagacatgaactgctcaacaatatagaccaaatgctggaccataaaataagtcacactaaattccaaaaggaataaaatcatacatggtatattgttaaaccacaaaataaacttgaaattaataaagttaacttgaaaaatccccagataatttggtatcaagtaaacttgttaatcactaatggatcagaggagaatttacaagggaaattagagaatattttaaatctagaccagatgtgatagcatacacctgtaatcccagcactttgggtggtggccaaggtgggaggatcacttgaggccaggagttcaagaccagcctggggaacatagggagaccttgtctctgcaaaaaaaaaaaaaaaatttaagtagctgggtgtggttgtacatacctgtagtcctagcactcaggaggctggggtgggagacttgattgagcccaggaattcaagactgcagtgagctgtgattctgctgctgcactccaggaaaggcgacagagctagaccttttctctaaaaagaaaaaattaaattaaaaaaattttattttcaatttaatgaccagaaagtttgtgggtgtagctaaaacagtgtttagaaaaattttcatagctttaaatacatgtattagaaaacaagaattttcggctgggcgcaatggctcatgcctatgatcccagcactttgggaggctgagatgggcagatcgcttgaggtcaggagttcaagaccagcctggtcaatgtgataaaaactcgtctctattaaaaatacaaaaattactcaggcgtcttggcatgcgcctgtagtcccagctatttgggaggcggaggcaggagaatcacttgagctggggaggcagaggttgcagtgagccaagatgacgtcactacactccagcctgggttacagggcaagactttgtctcaaataaaaaggaaaagaaaataagaatttttaaaatcagtgctttaagctaccagtttaagaagctaggaaagggccaggtgtggtgtctcccacctgtaatcccagcactttgggaggtcaaggcgggcagattacctgaggtcaggagttcgagaccagcctggccaacatggtgaaaccccatctctacaaaaatacaaaaattagccaggtatgatggcaggtgcctgtaatcccagctactcaggaggctgaggcaggagaaacgcttgaacccgggaggcggaggttgcagtgagccgagatcacaccattgaactccagcgtgggcgacagaacaagactccatctcacaaaaaaaaaaaaaaaaaaaaaaaaaaaaaatactaggaaaaatggttagctgggcatggtggtgaatgcccttagtcctaactgcttgggaggctgaagtgggaggattccttgagcccagcagttcaaggttgcagtgaactatgattgtgccactgccttctagcctgggtgacagagtgagaccatgtctctaagaaaagttggtgaggacgccaggggacagctaggaaaaaaaatgaaagaaaattattccaaaagtagtagagggggaagaaaataaaaagataagagcagaaatcaatgaagtagaaatagattatattatcagcaaagtcaagagtttgttttgggtgggtttttttattttttatttttattttataagattgataagtccctaacaaaactgattaaggaaagaaagaacaaccaagcaagttgccaataccaggaatgaaagagtagacgtcagtatagaccttaaaagaataatatgggaatatatgaatgtcaacaaatgtgatagtttggatgaagtgggcaaatttcttgaaaaatagcaaaccaacacaagaggaaataaaatctcaatatctctatatcttctaatgaaattgaaacagtaatttaaaatcacccagaaagaaaattctagactgtttttactgttacattctaccaaacatttagggaagaaataattttcactaatcttacacaaactctttcagatagctatgcaccatgatgcatgcctgtagtcccagtaactcaggaggctgatgcagaaggatctcttgagcccaggagttcaaggctgcagtgagccatgattgtgccactgcactccagccaaggcaacagagcaaaaccctgtctcttaaaaagtaaaaaaagactgggtacggtggctcaaacctgtaatcccagcactttgggaggccgaggcgggcagatcacgaggtcaggagatcgagaccagcccagccaacatggtgaaaccctgtctctactaaaaatacaaaaaaaaaaaaattagttgggcatggtggcgcgcgcctgtagtcccagctgctcgggaggctgaggcaggagaatcgcttgagcccaggaggcggaggttacagttagctgagatcgcgccactgcactccagcctgacgacagagcaagactccatctcaaaaagaaaaaaagaaaattcagagaatacaggaagaggaaatatttgctgaccctataaccaaggccaaataactgaaataccaactgtgactggatcgttacaagaaaattatagatcattgtcccccatgaacataaacgtagtaatgtttattagatgtagaagccagcacttcagaagaaggattgtatatgatgacaaagatttatctcaggactgcgaagctgcaacatttgaaaatcagttgtaacttaccacgttaacagaccaggaataaagaatagagaatccagaaatagacccactcagatacttaaaacagagtaccaagacagttcaatggagagaaaagacattgttttaacaagaggtgttgcagcagctgtttatctgtggaaaaaataaaacttgacccctggcttaaactataaattaaaaataatttggaatagattatagacataaattggtagtagaattggagtagagcgaggggggtgtggcacgatcaggaactcacggaagagatttgctctaaccattgaatgcgtaatccagaggacaagcaatgggaggccaagccaggtgaggaaacacagagcagcctggagatgcaaatatacatcaaagtggctgatgtcttggtcatcacccaggaatactagaaataactggatgggttctactccccacagaattcttgaaagcgctagtccccacattaccgggatattgtgggaagttgtattaggcttctcctgagcttactggagctgcagccagactggactgcacctccaagggagtcccagtggctccccttgtctaagatactgtgctgctttctgaagccacatttttttttttttttttgagacagagtctcactctgtcacccaggctggagcacagtggcccaatattggctcattgcaacctccacctcccaggttcaagcaattttcctacctcagcctcctgagtagctgggactgcaggcatgcgccaccacgcccagctaatttttgaatttttgtagagacgaggtttcatcatactggtcaggccagtcttgaactcctgatctcgtgatctgcccacctcggcctcccaaaatgctgggattacaggtgtgagccactgcgcccggccctaaagccacattttaagagggataagaacaaatagaattcattaaattaggagtccaagaaaggaaggggagagtgtcctaaagaccatgtgaagtgagtaatggttgaagggactggagttgactaacctgaaaatgagcaaattgcaaggggcatgattgtaatcttcatgtgttttaggagcagaaggataaacttctgctgtgggctagactggtgaaaatatagaaaatgttgagagaagaggtaggttttattaactgaagtgaatagtttgaacttttatcttgaggacagtggaagccaccagaaggtctaaagcacgataatgttattacatttatattttgtaaagaatcactctgactaccatctttaggttggatttagaggttgtggaagggggaggtactgttgaaatatagtgaaaacctgcttagatgaaataccaaggaaagagcacagtatatcaaaagtgaatgatccctaagtactgtagaaacttagagaagaaatttgatataacctagtatggcagagaattgggccctttctagggacctttttactcatattgccagaactttttgcagctgctttaggcagaatgcagcctcacagtcctatcttaaggggaagcattgaaaccagagtccattgtctattgccttggaaatgctaaaaaagctcctcgtaaacctgtctgctgatttggctgtttgtccagatacttagtattagaatcactgaaccttaatgttggtgttgaatgtaccatttctgctacttctctagttggtatgggtccttgctgtcccatctgcataactgcctaggacagcactccatgtgttataaacattgcttgcatccaaggatagtggacagtatattggctcccccttcccctgccctccatattgccataaaattcccaaactattcagtacactttaatttccaagattattaatttgtacagatgctggggggagaggtagacaattaccatcattaaaatgctgcattactttatatcattgaataatgtcaaacattttttaaaatttttttatcatttaaaaacatctctttaagctggaagctctttgacatcctttggaacagaaacatcaaacagtggtaccttaccccaaagtagtgcggttggttctgcctttacacaggatacaagatctctaaaaacacagttatctcaaggtaagctatctcatccctaaaatatttccattctaaacttttatagtggtttttgtctttctgaatgtaagagcttttgcagcttgtaaatcgcgtgtataatttctatttggctcttttaaaatttttctccaaatcgctgtattgcaatgaatatattattgaatgactctcactatttagacttattacagttcttagatcatgaaactgaaatgctgagcattctctaagttggactttttttgcaaagcaattatataacttgtatgtaacacttaaatatatcaaattaggctcatactcaccattaaagttgagctatccaagatgaattggaaatatcatctgaaaaaaactgtattatgctgttaacattttccctaacatcctcacaggatggagagtagtggttctcagtgtaggctacccacaactgaatcatctggggtgcttcttaaaaatttaaatcctgagacttatacatcagaatccctggagcctgaggatttatattttaataagcttcttaaaggattgttttatttcttaagattctgctcttcaaccagccagtctcataattttaaatggttatccataccttttattcttatctttgtttcttccttttttcttaatctttttctttcttttatttacttattagagatgaggtctccctgtattgcccaggctggtctcgaactcctgggctcaagcgatccatttgccttggcctccccaaagtgttgggatgttgggattacaggcgtgagccattgggcctggctttttttttttttttaaagataggtctcactatgctgcccaaactgaaatgcagtggctatttacagatgtgatcatagtgcactgcagccttggacacctggccccaaacaagcctcccactttagcttccccagtagctggggctacagccttgtgccaccatgctcggcttttccttatctatttttatgcactttagaaatgggtatttttggctcattgctttatatgaatggtttttgttttgttttgtttttaagtaaaacaatgttgagtcatttcagaaagacctatagtcacaagacagtattttaaaaagctattaagggtaaaaattcaatgctaaacataatcttatgtatttcacttaagatattttgaaatagttcttactgttactcatattgattagcttaatttttttctttttttttttcttttaagatggagtcttgctctgtcacccagactggagtgcagtggcacaatctcggctcactgcaacctccacctcccaggttcaagcgattctcctgcctcaccctcccaaatagctgggattacaggcacgtgccaccacgcccagctcatttttttgtatttttggtagagatgtggtttcgtgatgttggccaggctggtctcaaactcctgacctcaagtgatccacctgccttggcctcccaaagtgctgggattgtagatgtgagccactgcgtccagcctacttgcttaatttttaaacattctaaagattgtttgtttgttttttgagatagggtcctgctctgtctcccagactggaatgcagtggtgtgatcatggctcactgcagcctctacctcctgagctcaggccatcctcccaattagctgagatcacaagcaagcaccaccagctagttttgtagggacggggtttcgccatgttgccaaggctggtctggaactcctgggctcaagtgatccacccaccttggcctcccaaagtgctgggattataggcatgagccacagtgcccggcctattctggaatttttagttaaatcaggaacacatgaaaaagaagcataaatattgaaattagcattattcatgaagaatgagaactaataaggaacttaaattaggcacaggcaaaatgtaaattaaatatacaaaagtcaatagttctggccgggcacgatggctcatgcctgtaatcccagcactttgggaggccaaggcaggcggatcgcctgaggtcaggggttcgagaccagcctggccaaccaacatggtgaaaccccatctctactaaaaatacaaaaattagccgggcatggtggcgtgcacctgtaatcccagctactcaggaggctgaggtgggagaacccgggaggcagaggttgcagtgagccgagatcacgctactgcactccagcttgggcgacagagcgagactccatcttaaaaaaaaaaaaaatttaatagtcctaaagcctaatccattgattatgtaatgaggagaaaagatgattacagtaatgcaaaatagaaattgtatacaaaatatataataagaaataagttggtcatactaagaaatatgaccaacttctatgataaataatgtaagacagggacataaaagttgcatgtaatggaaaaaacatatcttattgctagatagaagaacaagaacagtaccagcacttagggaggcaaagccaggatgatcacttgagcccacgagtttgagaccagcctgagcaacgtagtgaaacttcatctctaccaaaaaattttaaaaataagcagagtatgatggtggacacctgtggtcctagctactcaagaggctgagacaggaggatcacttgagcccaggaggccgaggctgcagtgagccctaactgcactacctcactccagcctgggcgacagaaccaagaccctgtccccccccaaaaaaaaaagatgttgggaagactttactcctcatagttaacaaatttattgcaaattaattaaaaatcaatgcaaatagaatagtaggagaacttagtaaaacagtttatctttaaaataaacatggaagtgtggctggacatatttgaaaaataaaagtaatgggtttactgacatgataataaaatgtagcaatgcaggaaaaaagaaagagatgaatagaaagcaataggcaggcagaaacagatccgagtataaataagaatttatcctgggtgcagtggttcatgcctgaaaccctaacattttgcgagttcaagatggaagccagggatttgagactagcctgggcaacataccaggaccctgtctctaaaaaaattaaaaattagttgggcgtgatgtgtgcgcctatcagcttgagaggctgaagctagaggattgcttgagcccaggaggttaaggtggcagcaagctgtgattgcggccctgcacactagcctaggcaacagagcaagaattcatcttaaaagaatttagtagatgataaaggtattattttaaattagtggagagaaggctgtctgttccaattaataatgttgcctgatcatttggagaaagtcactctagattctttccctcatactgagcaccaaaaaatatataaattttaaatagattaaaatgttaaaaattttgaagtatgtgtttattaaaagaaagaggtgtatttacataaagttatgacaaatgacaagtcctaagagtttgcatttaagttttatcaactaaaattgctgaatttcacaaaattaaaattcctagaattttaagtgtgataagattgtgaagatagctcaagggagtgtgtctataatatgcagaaatcacttctggatttattcctaataatgtatccagtatcacagtatcacctgtatttccctgtttataacaaaactggcatcatgatgattagtaggccttaatagtgaaaaggctttttaagtacacaacaaatgtttctgtacttgctccgattgccccattgcttgtacttctgtagtacttgtgagccataggatcttttctcaaaagccttgataaagaagttttataaacttataagatgatttaatgtagtaccataaaattaactgtagcagtaggctttttcaggaagacatgtgaaataaaaaaaattagcaaggtgtggtagcgcacatctatagtcctagctactcaagaggctgaggcaggaagatcattgggtcccaggagttagaagttgcagcgagctgtgattgcgccactgcactccagccagagcaacagaacaagaccctatcctgtccctaaaaaacaaaaaacaaaatgtgttttataagtgattataaaatgtttttttcataggccaaaacttacataaaccatgatttcccattataatccagtggaaaaattgtaatgcttctattagtggtaacttaattttgaaatgttaagtagattgtgcctgtgtcggtttctgggttttgataaatgatcatttatttggctaactttgccattaatggctgaaatggtattgcacatttgtaagtgcatactttagataatcataaattggggaaatattactaataaattatccctgaatcatctaggtacataataatgcattgtcagcactcaccagttgtttgacacctgcaaatatgcacagatggacagtaacatttgcagcatatttgggggatttttttacgtgaaatgagcattttttttaagcaaaacattatattttggaataattatgagatgtgagtgcctaagcagagatgtacagcaaacattatcaggacagaaagcatgatgggagcacccgatgttacattcttcagttcatgctgtgaccaggcgacctcataaaaggaaaaatataatgtataagtacaaaccccattttttgttttggctcttttatatttgtattttttgagacagagtctagttttgtcacccaggctggatgcagtggaccgatctcggctcactacaacctctgcctcccaggctcaagcaatccacccacttcagccccctgagtagctggggttacaggcatgtgccaccacacctggctaatttttgtattttttttgtagagacaggctttcgccatgttgttcaggctggtctcgaactcctgagctcaagcgatctgcccatctcagcctcccaaattgctgggattataggtgtgagcaaccgcgcccagccaaaccccatattaagcaaaaacttgccaagagatcttttaaaaggcaaggaatgagtatggctactgtgtaattatctgaagggttttttttgtttgttttttggttttgtttgtttgtttttttgctggccttttagtttttatgtttaattacccaagcccctaaagcattaaagaacttcacctatctaactttgtagttcttttactttatttatttatttatttatttatttatttatttatgagacagggccttgctctgtcacctaggctagagtgcagtggcacaatctcggctcactgcagcttctgcctcccgggttcaagctatcccatctcagcctcctgagtagctgggaacacaggcacgcgccaccacgcctggctaatttttgtattttcagtagagacagggtttcgccatgttgcctaggctggtcttgaaatcctgggctcaagcgatcctcctgcttcagcctcccaaaggactaggattacaggcatatgccactgcgcccggccctttactttcttataatagaaatttaatggagttaatacctgtagatagatgtaaaggtattgttttagtcatctacagaaagtactaagaaagattaaaacaagtcaccatagtcttatggttgtcattggcgaaagcctgtgtttgacctgactacaacatgataatttgtaggataattctagggaatctcgtacctggcagcaatttttttttttttttttgatgtaaactcttccactaagtagaaataacagataaaattgtgagggggagggagttgttttgaagctgttgaagtttttttttaaattattattattttttatttttaacctaatgacaagcccactaaggataccattcttaatatctggtctgataagtggattaattcaaatttgtgctaagggtttgaattgatagaaataaaactctggacaattttttttagggtctagattattttgaaatccccaatagggtagtttgttatcttttggttacattttaggtcgctcaagccctcagttagaccctttgagaaaaagcccaaccatggaacaagcagtgcagaccgcctcagcccacttacctgctccagcagctgttgggagaaggagtcctgtatcaaccaggcctttgccatctgccagccaaaaggcaggagagaatcaggagcacaggcgaggtagaactttagctgtttactgttccttaattgactgatcaatgttttccactcactttattttcattagaaggatttacttcatgtgaatgatcccagaaaattaaactgaatatgatagaatgtttggtctttcaaatttgactcaaagtggtggtggtgtgggtatagttttttgggcattgcacaggctttgttttgggttttttggtttgtttgtttgcatttctaactatggaagtttttgatgatgtaccctgagttgatttggcactttgcatgtcttcttctgtagctgaagtacacaaagtttcaaggccagaaaatgagcaactcagaaatgataacaagagacaagtaggtaagttcttggatctaaaagtcatattctatgcttctcaacagggagaatattttaaatatatgatacataattactataaaaaaatgaaaggcgggggttgtgactgtaaaggaggagcacaggggagtgtcactgtggtgacagaacagtcctttatcttgattgtggtggtagttttgcaaatctatatatggtagaacatcatagaactatgcataaagacataccaaaaaatgagtacatgtacaaactggtgacatctgagcaaggtctgtagtttagttaattagattgtgcctgtgtcggtttcttggtttcgataatgtaccataattatataagatgtgactgttggagtttgggaagttgggtgatgggcacaagggacgactctgaactagtttttcaatttttcttttctataattactttaaaataaaaagattttttaaaattttacttttctgggcccggcacagtggctcacgcctgtaattccagcactttgggaggccggggcgggcggatcacgaggtcaggagctcgagaccagcctggctaacatggtgaaaccccgtctccactaaaaatacaaaaaattagccgggcgcagtggcgggcgcctgtagtcccagctactcaggaggctgaggcaggagaatggcgtgaactggggaggtggagcttgcagtgagccgagattgctccactgcactccagcctaggcgacagagccagactctgtctcaaaaaaaaaaaaattttacttttctggaaaaaaattctacttagtggtaggcctttttttttctgagatggagtttcactcttgttacccaggctgtagtgcagtggtgtgatctcagctcacggcagcctccgcctcccgggttcaagtaattctcctgcctcagcctccctagtagctgggattacagccgcgtgccaccatacccagctaatttttgtatttttagtagaaacagggctttgccatgttggccaggctggcctcaaactcctgaccttattttccacccacctcagcctcccgaagtattgggattataggcgtgagccaccgcacccagccaggcagttatcttttaatatgttcttgagtatttcctgctagaaggatttgttcgtttatatttacattttcctatggcttctacttttgtggtttttatgttttgtgtcagtttcaagttaggattataaaattggttttcattgttttctatgcctttgggaatggaattttcttcatgttacaagtttgaaacgtttcctcattaaaattaagcccagaggccaggcacggtggctcacacctgtaatctcagcactttgggacgccgaggcgggcaggtcacgaggtcaggagtttgagatcagcctggccatacggtgaaaccctgtctctactaaaaatagaaaaattagctgggtgtggtggcacacgcctgtagtcccagctgctcgggaggctgaggcaggagaatcacttgaacccgggaggcgaggttgtagtgagccaagatcgtaccactgcactccagcctgggcaacagagcgagagtctgtcaaaaaaaaaaaaaaaaaaaaattgagcccagatcctgtttttgaatcagttgtttaagagctgtagttttcttttatgattattgatttaataaggttttatattttctttatctgttttgtaatatataacattctaaaatcattcattttattaatattttcaaatttattaatggaaaataaattataattttacaactcttctaaattaaaaagggaatgtataatctaccttatttagaaaatgattgaaaaatgatctttcacttaattttagaaatctagatatgatatttttagatgtatatgtactcttctctacatttatatatatatatatttttatatcccccccccccgtgttttttttttttttttttttttttttgagacagagtcaacctctgtcacccaggctggagtgcagtggggcacgatctcagctcactgcaacctccaccgcccgggttcatgccattctcctgcctcaccctcctgagtagctgggactacatatgccatggaatacagaattttgtttaatttgactcattatattttaccctttttattcagaaaaagagagagctcccctcccaaaataaaataactgccatactatctttcattgcccttcaaaactcaccccaccaaagaggttcattaacagaacagtgcatattcttcccgattttttttgtagattttacagacacagacatctatacccaaaacctttttttttttttttttttttccccctggagatagaatctcgctctgtcacccaggctggagtgtagtggtgcgatctctgctcactgcagcctttgcctcccgggttcaagccattctcctgcctcagcctcctgggtaggtgggattacaggcatacgccaccacgcctggctaatgtttctgtatttttagtagagatggggtttcaccttgttggtcaggctggtctcgagctcctgacctcgtgatccgcccgccccggcctcccaaagtgctggggttacaggcgtgagccaccgcgcctggccccaaaatatttttttttaagacagaaggatcatggtgtaattctggcttgtggccgaggcatttttaatagtagaggtgaatgtttcaaacatcctacttatctagatttatgtctggatatgctgctgtggggttttgtggtttgttttctcaaacccaggcagtttgccaaacctcagcaaacagcgcaaacctatcttgttaccctgtagtcacttctcatccttgtcagtatgtgtggagcatttcacgcaattgtgatcattaaactcatactggtttctgttctgcgtttttcagttaacatcaaatattcttcctctgtttttttcttgttagtcatttttcttgtgttggatatttgggttcccacgtttttcactataaattatgctgctttgtattgctttatcatgtctcttatgattggctgaaattttactgtgttatagaggagagagaatgtgtagatacaggaaggcttgaataatatagagccatctggagagacacagtaaagatggagtaggaagtgttttgagtcagtaaggattggtgcttgtctgttttttatctgtgatgtggaaataacacctattttcttgcaatttgtgccgattagtgtttatttttcttactataaatcttggttcctgttattctttccataaaaggctttctacattttgagaacccactgtgtgtctggcacttcagtttgccggtgttggggatatagcagtaaggaaaacaaagcccctgacctcaaggagcatacattaatttagtgcagaagcctccacacttgcctggctgtatactctgtcagtaacacatgtgagtgtggactccataaatacaaatgtttagaaattttgtgtgagctattctcagtctacatattaaatattagtgaaacttaattttttattttgtataaaaaatacaaatacaataaaatatatagagagacctgtaagcatttctgttgttgactgttgaatctaaagagcacaatagcaacatctgtgctaaaccagctattacatattgaatgtcctttgtatatattctttattatcatagctccaggtgctccttcagctccaaggagagggcgtgggggtcatcggggtggcaggggaagatttggtattcggcgagatgggccaatgaaatttgagaaagactttgactttgaaagtgcaaatgcacaattcaacaaggaagagattgacagagagtttcataataaacttaaattaaaaggtaagctttgatttttcttttcagaaaataatcttatttgatctgtgaattacagatgtttctcagattaggtgtttttatgtaattcagattagctgtcttgacttttctgatatgtgcttttgttcttagaagataaacttgagaaacaggagaagcctgtaaatggtgaagataaaggagactcaggagttgatacccaaaacagtgaaggaaatgccgatgaagaagatccacttggacctaattgctattatgacaaaactaaatccttctttgataatatttcttgtgatgacaataggtacagtttttaagctgttcttttatcttatgatattgattgaagtgtaaaatggtttcatgtaaattcacgaggtttaatgaatactaccataattgttttgttttgttttgagacagtcttactctgttactcaggctggagagcagcagtgcagtcacagctcactgtagtctcaagctcctgacctcaagcaatcctcccatctcagcctcagtaaaggggactacagttgtacaccaccccacccggctaatttttttcatttttttgtagagatgggggtctcgctatgttgcccaggctaatcgtgaactcctggcctcaagatcagcctcccaaagtactaggattacaggcgtgagccaccacacctggccataattgattttttaatgttttatttgctaaaagaaaatatatactaaagttctaaattattcattcaaaagaagaaataaccatatacttttgtttaaggatatattcatatttgaatattagcaattaaaacaagcatttaggtaatgtctaagtaggacctttttttcacccctgtatgttacagttcaaatgaagccagaaccgaagtgctaatctactttgaagtttgctggtaccataaaactgccagattgtagtaaatgtgggtccagaaaattggcaaattattgagaggttaattaaaggacccagtgtgaggaactaacagttctagaggttctcctgcccaatccaaattgtcattgtccttgtccttttcctggctgaagtttggtgccctctggtggcagttgtttgcttcaatataaacatggatggacataattctgagtcccacgattggctggatgacagcagcaataattcagatacttcttgggttacttggtatcgggtccatagattgggccaggaacataatggggacctaagggcccaccttccatctcctagcttcccaagacaaggcctccctgtctgactttaccttcttttcccttggggctgagtggaaagcgaagtcaattaccaatctcattatatctgaatttccattattttggagctgttactatgtttatcaggtgtatttgcaagaaactaatgtcagtcatgtgttcacatgaagtttaacagaatattacaggaacatattgaactcatatgccatgaacaactcgtgataacttagataagatgcttttttttttttttttttgagatggagtttcgctcttgtcacccagactgtagtgcagtggctcgatctcgactcactgcaacctccacctcccaggttcaggtgattctcctgcctcaaccccccaagtagctgggattacaggcacctgccaccatgcccagctattttttgtatttttggtagagaatgagtttcaccattttggccaggctagtctcgaactcctgacttcaggcgatccgccccctcggcctcccaaagtgctgggattacaggcgtgagccatcacgcctagccaagatgcttatttctaattagctttagtaattacttaggcttaatttgggagtagcactgcatattttggctgagggatattcttttaaacctgatatgctgaagattatttgcttttataatagagaacggagaccaacctgggctgaagaaagaagattaaatgctgaaacatttggaatcccacttcgtccaaaccgtggccgtgggggatacagaggcagaggaggtcttggtttccgtggtggcagagggcgtggtggtggcagaggtggtaccttcactgcccctcgaggatttcgcggtggattcagaggaggtcgtgggggccgggagtttgcggattttgaatatagggtaagtgttactgttaataaattctttggggttgacatgcattttacaagactcaaaacatttttacttgtttttgttttgggtgaattgttttgaggacattagaataacttccattttgacttttcagtagaggatatacgtgattcagatgtatatataaagacattatacaaaaaaagacagtatagtatcacctttatttcatgttaacagaatatacttttaacacccaaagagtctatctaggaagcacatactcccagaatggaagggcaagctttaacatttaatagcagttaacatttatatagtatttaccaagtaacaagacattgttttaaatatttttttacatattaacttatttaaactgcacatcaactctgtgaggtaggttctattattatccccattttacaagtgaggaaatgggtatagagatattaagtaacttgcgaaaggtcacatagctagtaagtgatggtgctgggtgttgagcccagcaagttgtttcctgagtcagtactcttaatttggttttgttgaaaattcactacattttccctggttttctcctttcaccatgaaattgaaaatgtttcgatatattggccttcaggagctactgctagagaattctgtaactctgtatagtagccttatgtgtataatgtagcttttgacaggtgtctgtaaattaagtcagcatagtaactatctcagttaacagtaaactatcttagtttattgattttagaagtagtggagaggaagggctataacagaaaggaccaaaatcttgtaaagagttccacttgtaatagcaacaggcagctggaaacagaaagacctgttagcaggagttccattgcccagtacttaaaactggccattgttgagatctctctggaaagagatcagtattagtggcttttggacctgctctattaattttaatgcttttgatattgtgccatcacagccaagactgccaaaaattatactcaagtcaccagcttatgccatccagccgttggtggccttatgtagttgcgggacttctgacttgcaaaatcaccttcccagctaggagaatctgtcttaggaactccagaatagccctcgcttatcactgttactgcccttaagtttgccagtgacaccttgcttacagaattcagcagtagtattttcacaaatattttatttgccattaactcctctgcaatatttgacactgaccaaccacccaatttggggtctttcttcctagtctttaaaatactcttctaggttttcaatttatactcttcctaattttttaatactcttcattcttttttttggggggtggagggtgtcagggtcttgctgtgtcacccagactggagtgcaatggcatgatcataagtcactgcagcctcaacctcccaggctcaggcagtcctcccacctcagcctcctatgtagctgggactacaggcatgcaccaccatgcccagctaatttttaattttttttgtagacactgggtcccactctcactatgttgtccaggctggtcttgaactcctgggcttaagcgatcctctcacctcagcttcccaaagtgctgggtttataggtgtgccatggtgcttgttccatcctcccttttgtaagcctgtcctggaccctatgtgtttctgcaccgcatctctatctgcactgtttgctgtcagcttaaccttcctcagactgatctcatcatcttccttctctcctgtcatctcagctctgcctcctcccagtgttccatgttggctcatggtatactgcccaggcactagaggtatccatgattgtggcctgttgccatttattcctttgagatgtccctgtcaactaccatggtaacccaccagttgggcttcagaccttcgtctctctttaccccactttaaggcagatcagctacattttgaacaacctgtgacaactccttgttgaagaccacattgagtcagcttggtctgagaaaaagtacatttaaattagacttggatccagatgagaataatagcagtagttactagtatgacctttcagacccttggttttgacatttgtgaataaagagttgcaccatttattctgaaataacaccttttaaagatcattaaactttcagagttggaaaacatctgagaggtctgacctggttaaaacataaacctcttctgcagtatctcttataggggctgggagcttactcttcccaagggcatccatcccaccccagggatgttctaactgttacaatctcagctgggcgtggtggctcacacctataatcccagcactttgggaggctgaggtgggcggatcacctgaggtcaggagttcgagaccagcctggctaacatggtgaaaccccgtctctaccaaaaacataaaaaaaattagccgggcgtggtggcacacacctgtaatcccagctactcgggaggctgaggcaggagaatcattgaacctgggaggcagaggttgcagtgagccgagatcacgccactgtactccagcctgggcgacagagcaagactccgtctcaaaaaaaggaaaaaacaaaccttccatgcagtaactgtgtgtgctccatgtggttactaatacaaacatttttttgacaccatgtcacactgtttatcattttgagccttttgtaaaactcgtatcacatatattgcagaattgaaaatgcattgtcatagttacctccatgcatctttgtctacgctcctgtatccttgacagatagtccagcctctgcttaggtgttgccaggagtgatggactcagcgaaccctcaggcatggcccagtgtttaggaggctcagttgtgacattgtagtccctgctcttcttaattgtgtgaggatcccacttgatatatttggcctcattcctcattaccctttaacctatctgattcaagcaagctgcctcatggttatctcacatacacattgtgcttgattccaactccatccccattcatttaccaaatatacagaattcttcagatatgccaggcactatgttgagcattggtgctgaccgatgtaggcccagcccttttgatgtttacattttggtgggagacagacatagctaaaagtcaggtcccccctttcacttatcctttacagccttgcccaagttttgctctgtcttctcttccttcctacactgatttcctcctcttctgacctgtggctatctgctttctttggcacacattttaaatacactgacattccctattttttgtatttagttttgttctgcatcaccagctagatgagaacctcttggctttagtgaatatgtattctacttttctttccatgacaacactcagctcaacatggagccatagtgggcttgaagtaattgcttgtcatgttgattaggaatttgccactccagccttcagtgagaccaaaggtctgtcaatgtagctagcctttgattgttcattccagagttgaataatcctttcatctgccactagagccccgaacccagcagccctacacctcctaaatcataaaatcatttcacctggcacctttaaaggtagaaaatggtgagtgatcactgtcacataaaggagatttaccactgaagattaaacttgtatctgaaacatctaacacttcctcccagagatggacatggatgacatttctgcagccttcatgaaatgagttggctttattttttgtgctatattagcatgagtcattgtggtttgggggtaagcataaatgagcttggttgtttaatgaaaacatgggtaaagataaaatcataaagttttagaatccttaaaagaatcagccaaactagaatctctacgctaccacactcacattagatgataaggaaactaaggaccccaagaagttaattgtcatgattgaggtacaagctaacaaatccaaaactcactctcttgacttgtggcctgattttccttaagggtaatattgtaaatataggccagtgcaatggtgtacacatgtaataccagcattttgggaggccagggcaggattgcttaagcccaggaattcaaggacagcatgggcaacataaggagtccctatctctataaaaaagtttaaaaattagctggagtggtggcacatgcctgtagtcccagctactcaggaggctaaggcaggaggatcagttgaacctgggaggtcaaggctgcagtgagccatgatcgcaccactgcactccagcctgggtgacagagcgaggcctgtctcaaaaaaaaaaaagaaaagaaagaaatataaccttatggtaagtttggttgtatggtgttttccccctcccaccgcccattcttttttgaggtgagaatggaaatcaggactagcaataataatgtaaccagctcctgttttatatgctgctgtcagggaggttaagccaccatggtgggtgataaaaatcacatctgtgtttcctcagatggggttcaaagacaacaaggtgtctgaatgactcagcataatgctctctctcctctccccctttcattttctcctttctccctctcctgtccccatctctttctctttttttttttttttttttttttacctttcagaaaaccacagcttttggaccctaaaaggtctggattgatcgtactgctttctgaaaggtaaaaaaaacaaatactttgggaggtgtgaaggttggctttgtgggggacagcaggttcatcttgtagctcattgctgtcaacttatgccataccatatgtatttcagtttaataacggggtgcaaatgttttggtgttgtatacacagatgaagttaagtctcacctaggaaatgtctgtttctaacagttggggtgagaatcagcagtaaaaaccaggtatatggtagcagctggtctagaggaaaataaaagcccttggctccagccctttgtacaggcctttagtttagggtcagtctctctggaaatcttgagatttttattgcttcctcactggttactttttaaaaattccccagtcagctttctacttttcagagcttatttcagatttaagagttatccttgtaaaattgatttttaaaccattgcttcctcctggcatgaaattttggagagaaatgttatactgactgggtattttattgcttagtaaagacatcaaagacttggggattttatgaaacttgtttcaaagtatgttgacagttgtatttgatgagtttgactattgagttgagggtttaagtcctatcactgcttttaaaaaattattagggagaacaaccaaagatgaggaagtatgcctgtattttggggtggggttcaccactgcattaacctctactgactggaagatgcagtcaacaatgaggtactactgagtatggaagttatagaaggagtttcgtggaaatgagtgagacaggtttttctatgaaagtaaaagtgggggagtatatttaaagataatttaaaataaacttgagcaaagtaaaaagaaaataatacaccaataatttggaacatgagctaaatttttttttcttttttagaaagacaacaaagttgctgcatagtctacaaacaagtctctgaaaataggtgaatttctagctcttcatggtcctgaacattgatttcagtctttgcaaagaatgaagaagtgaattcgctgtacatttgtcaccagcactgggtttttgttttttgtttgtttttccgcttaatttcaaagataaaatgcagttacttttgggggtggaaggctcatcttaaaacatgagcattaaatatatttggaatagcagaaggttaagtaatttcttatgtatagttaaactaaagcagtacttcagtgggacttaacaagtattttttcatcactgaaaggttttttttttttatcactaaattgtatttggcaattgcaagttgcctgcagatagggccgtgatactgtgttttgagccacagaaggttgtgtgtgtgtgtgtgtgtgtgtgtgtgtgtgtgtgtgtatgtgtgtgtctttttcctcctttcttttggggaatcctgtaatatgaggtagcttatttcgtcaattaattagggtgctggatggtagagaattttgtcagtcaactatgtacacacagtaaatactgtttcttaggcaaaggtaacttttttatatagttgtaaaattccattatattccattgccaaagaaacattaagaactttgtatagctgtataaaaagcaactaattttttaaagaataaacattttaaagtcagcaaacatactgtgtccttgcagaagttgatgtgctgagcagcagccttatgggtgggtctttttttcttagttttccaggcttaacatttttgattttgttttttaatgtttggaacataaatgaagatttgatacattatttcattatctaaaaaggattaattattcatgctcattgtaagaacttcattttgtagcaaatggcatatcacaggatctgtccagataatcgatattttcagtatacaaatgtaaataatcacagatgagaatgtacttagctgtattttcaaataagtaatcttccccccttttgtaggactttaaaactaggcatcaatgaacctgtttttcctattatgcctggaatttagtcatgataccttgactcattccatcatatttcaagaggattcagagtgctagaaattattttggtagcctgtaacacacggcaacactggtccttgggcctatgatgacccacagatgactcagtatagagttcattgctaattataaattactagtgaatctttttgatattttaagctctagtgggaaaaatctggccacttttgtgtttttatgaaggccatggaataaaaggatccaaagatttaaatatttttatctaatattttgattgttttcttaactttctccttaaaacattcagtagtgataaagatatagaaactgcactgtaggagaattggaatatttaaggctggttgacattttttattttcattttatatcttttgtatagctctacaaggcagtgttttgtaatttggtttcattatgaagatccagtacttggcagccatagtttagacaatattgttcagtgctgtttgcttgcatgttaacaacaaaaccttttagaggacccacaaatcatgatattgaacacagttccgaggcattcagagcatcagagcaagtaccatggcaatacatgtgtagactgttggagatgtcccgggccaatttcaagaaagaaaactgtaaatactagttctacttgctctgaaattatgagtttatgcgttttcccagccctccgaatcactgactggggcgttttgtgccccagcaataactggcagcatggcatacctgcagtaccccttacaatattaaagcaaagtttttattctaaaacagaataaaactgttcaataaaaaatgctcgtcaaagttctttctctttaaatagtaacattctgtttcagtaggaacataatgaaaggaatcttttaaatggaagagcggaattataatgtttgtattccctgtaataactataaatcagttactttatttctaagattgagttattgttgcagatgtttagggaaagctaaaagccccttccttcccctcctgtgtgtaaataaaatacttctgagatcagatccgtgacatgaggagattgagccacccaggcacaggccaggctggaaacagcagccagaacacactccctgtgggcagacgcatgaagaagatgcagaatctgtctattaaaacagttcgctccaaaagctgggcttcatgtgatggtagggcaagaggtcgggaacagcagtgcagcacagtggctctcggtggggttacctgacatcctaggaacacagtcatctgttgcttaataatagcgacatgttcttatttttaaatagcaatgaggtctcacttcgttgcccaggctggtctctaactcctgggctcaaatgatcctcccatcttggcctcccaaagtgctagattacagacatgagccaccaggcccggccatgacacattctgagaaatgtgttaagcaatgtcatcattgtgtgaacatcagagagtgtactacacaaatgaagatggtatggcctactccacacctaagctatatggtgtagcctgttgctcctcgctacaaacctgtacagcatgttactgtactgaatactgtaggcagtcataacacagtggtatttctgtatttaaaacatatctaaacagaaaaagtatagtaaaaatacggtatcataatctttgggaccaccattgtatacccagtccatcgttgaccaaaacatcattaagtggtgcgtgagtactgaggaatgtgaggggatgtgttttggttgtcacaatcactggggatcaccactggtatttaaaagtaagggcccggatggtaaatgtcctgtgctgtgccacacaatcagttgtccaacccaaagtgcagtagtgctcctctactctgagaaacactggctaaagtccctccacatggaaagacagtaagtgggaaattatttcctgccaacttgaaaaaaaaaatttactacttaggaaattgtccgcttgggaatattaataataaagggaacttacttcctgtagcacatcagcattgtggaaacattaccacataggagttagggcttcatcctgttctctgtcagtgcttcacaaatctctgatcagaatctaccaaggagcatttttaagtacagattcccaggcccagagagtgattctgaagttccctagtacagcagaacccaacctttttggcaccagggactggtttcaccaaagacagtttttccacagatgagcagggggtatggttttggggtgattcaagtatatttattgtgcactttatttctattattacattgtaatatataatgaaataattacacaattcaccatcatgtagaatcaatgggaggcctgagcttgttttcctgcaactagatggtcccatctgggggtgatgggagacagtgacagatcatcgggcatgatcagtgagtgcgcaaccgaggtcccttgcatgcagagctcacgatagggtttccaaccctatgagaatctaatgctgctgctgatgtgacaggaggtggagctcggatggtaatgctcactcatcagcccgcctctcacccgctgtgcaggctggttcctaacagaccacggaccacgaccgttctgctgcccagggatcagggaccccttctctagtaggtcctaggaatcttactgatcccacaggtagttgtgattagctaggtttgggaagatgactgtacaacaccaaagctggttcctgctttgggggtgttgatatattttccacagtaggattatcttagcatttttcccatccttccaaacccagtatatccagattgtgactggggcatgaagagagggatgggactaagtggaaaggagggaacagttttgcaggatggaatcaggggaaatggggaggttgagactcgagtttcctccagagtttgggtgctttgagtactgagttttatttcgtttttattcctggcatagggtttgtgttccttctgtctcttaattttgcatgccagttgtccctgcctctgtgggttctctgcccatcagagaagccgctccttctgcagggcccctctgtccacagcatggctgagaagcaacttcttttcctgagaagggttacttaggccatccaatcacatctggattcagtgtgttgcaggatccccctgccctgttagttcagagattaagctgttttacatagtaaaggtggggagagtgtcatggtataaagtaatccaggtgaatggtctcttcctgtaggagtgcaggtgtcaccaatttgctttagtttacctgtcccgactggttttggggtttttttgagacggagtctcactctatcacccaagctggagtgcagtggcgcgatcttagctcactgcaacctctgcctcccaggttcaagtgattctctcccctcagccccccgagtagctgggattgcaggcgtgtgcccccacacccagctaatttttgtatttttagtagagatgggatttcaccatgttggccaggctggtctcgaactcctcacctcaggtgatccacctgcctcggcctcctgaagtgctgggattgcaggtgtgagccactgtgcctggcctgttctgactctgtttaaaagataacaagtattaggctgggtgcggtgactcacgcctgtaatcccagcactttgggaggctgaggcgggtggatcacgaggtcaagagatcgagaccatcctgaccaacatggtgaaaccccgtctctactaaaaatacaaaaaattagcctggtgtggtggcgggcacctgtaatcccagctacttgggaggctgaggcaggagaattgcttgaacctgggaggcggaggttgcagtgagctgagattgtgccactgcactccagcctgggcaaaaagagcgaagctccatctcaaaaaaaaaaaaaaaaaaaccacgtattattagtaaaattgaaatcaaacttagggaagtatcatagtaccattaatctgtcaatctgaagatgctaaaaggagatttgcttagcaggctgccttggcttctccaagatggggagacagacaacttcttggaagcagtgtcctccaaacagaaattggtcaaggaagggaagtgggagagagagctttgactagcagaggcttggaagccagccagccagcagccaacagtgcatgtgtgcattgggaagctagtggtccagggaccaggcactgctcctgtgggatccatcccagccctctaaggagcggtgcaaaggttcttatcctatttatcggagccagtgtccagaaaaggaagcttgtggtttgagacattctgtaaatccggttccaagagcacgaggtaggactctgaatccgatgtggtttctgttctcggtgatggtgcagagctgtgagccagtggtagggtgtcctttaaattccagctcagtacactagttaatgaacttggctgactgataaaaatgttttcaggtttagctcatgaacatatcaacatagacctaaatataattccagtttgtcatgaatgttgattttttgaggaaatgctttaaaatgtactgatgcccatgttgtggttgtaaggaaacaaagcagctctgtgaggccaaagcatatttcagttcaatagtgaggctttcttagaaagaatgactcatagtcactcagagttgagtcgcacagaaacaaccgagagcagacagcaaggaacggcagggcccagaaggtccagcctttccctccaggctgaagggttagggaagatcgccaaccttaaagggggtgtgagaggcctgggcccaggtgagattgtactgaattccagtaaacagtgtacagtcattccaggacagaggacaggaacatgtttactaggtgtctggagtgcacctctataatcctcatacacactaatccagataatcctgggatgctggcctcacgcaggattgttgatgagaatgcaaatcccaacattgcaattcaggattttgcttctactgaaagcattttgtcaatgttctcttttggggttagctgggtgacagttctcccttgctggattcccagtacttaatagcgtttctttgactcagtggatatgtggaacattgcagactgcaatttataacacagaactgggtatatattttcattataaaagtaatacatgtaaaaagaatgcaggcctcttctctgattgggtggtatttttaaaaagaaacaaagaatgcaggcagtgtagattatgtttgttttttaaaggaaagagaagaaaaaattctctaatcccaccacccacagctgaccatgttgacactatttgggtgtatattctgtctggcattatcctgtacaggcatatgctcttcagcaaaaatggatttggccgggcgcagtggctcagcctgtaatcccagcactttgggaagctgaggcaggcagatcacttgaggtcaggagttccagaccagcctggccaacttgatgaaaccccatctctgctaaatgcaaaaattattagctaggcatggtggcgggttcctgtaatcccagctacttgggaggctgaggcaggagaatttcttgaacccaggaggcagaggttgcagtgagccaagatcgcgccattgcacttcagcctgggtgacaagagcaaaactccatctcaaaaagaaaaaaagaaaagtagatgggcacagtggctcatgcctgtaatcccagcactttgggaggccaaagcaggaggattgcttgagcccaggaggttgaagttgcagtaagccatgaccacaccactgcactacagcctgggtgacagagtctaaaaaaaaaaaaaaaaaaaaaaaaaatccacatttctaaatgggaaaatctgaaggccttgatctgctgccaagggtcattggctgtgtcttttgaaacatttttattatgaaagtgtcatgtggttataggatatgagctgcttcagcccggcacggtggctcacacctgtaatcccagcacttttggaggctgaggagggcggatcacctgaggtcgggagttcgagaccagcctgaccaacatggagaaactccatctctactaatcatacaaaattagctgggtgtggtggtgcatgcctgttatcccagctactcaggaggctgaggcaggagaatcacttgaacctgagaggtggaggttgcggtgagccgaggtcactccattgcactccagcctgggcaacaagagtgaaactccatctcaaaaaaaaaaaaaaaagaaatgagctgcttcaaacaggtcctcactaaagaccaatgactggcattgcctgagcaacatagggagaccttgtttctacaagttatttatttatttatttatttatttatttatttatttatttatttatttggagccagagtctcgctctgtcgcccaggctggagtgcagtggcacgatctcggctcactgcaagctctgcctcccaggttcacgccattctcctgcctcagcctcccggcagctgggactacaggtgcccgccaccacgcccggctaattttttttatttttagtggagacggggcttcgcagtgttagccaggatggtctcgatctcctgacctcatgatccgcccgcctcggcctcccaaagtgctgggattacaggcgtgagccaccgcacccggcctatccaagtaattttttaaaaattagctgggcgtggtggcgcgtgcctgtagtcccaactacttgggaggctgaagcgggaggatcacttgagcccaggaggttgaggttgcagtaagccatgaccacaccactgcactccaacctgggcaacagagcaagaccctgtctccaaaagaaaaaaagaaaagtacacatcataattacctatgtaaccggcacccagattataaatcagattattaacagtaccccagaaacccaccaagctcccttccagtagtccccatcccttcaaggctaactacagtcctgacttctgacaccatagattacctttggtgtttttatataaatggaattacacagtatatactcttgtgtttggcctctctactcagcattgtgtttgggattcatctctcttgttgcatttggccatggactgttcattttcattgcagtataatattccattgtgttaatagaccacagttgcttctttctactgttgatgccgcatttgggtggtttctagcttctggctattaaaataatgctggtactgttttttccttcgggagagaagccagaactagagtgggtgagaggaatgctgacctagccctcttgaggacttggagcatggtgaaccatatggtagtgctctgcttgtcactaaccataaagtaccatacaaccctgatgtacagtagacatagatgtagataatggtatatattagagcagatccagagtcaatcctccgtgtgcctagcctcagtcccctaaggacagtgctcccccattgcccttactcactggcagcagtggaatatttcttgccctacaaaactgtgttcaggatgtggatgcggtctccttgcttccctgctgataaaaactcctaccccagtgaggttatgtgatcctctcactctcctggtgatgaccatttaatgacctgatctctgcccatcatatcgtgagaagtctgatactcatcttcctcttcctctccccttctgtcttattcaaagtgacttcagctgttgtgtgatctacccatctgtactgggggtccccagggtaatcgcacgcatggctatgacagtgtacagtgacaggatacagtgacaggatacaaagcaaaattcacaaagggaaaagatgtgtgggcaaagtctggaggaaaccaggctcaaacttgcaacggggacttagaaagcggagcctcacgggatgtgcttagcttctccagcagggagttgcaacaacatgcgtgggatattgtctgccagggaagcttcagacttagttgcccagggtttttactgggggctgattatgcagacaccctctgcgtggcacgtgccaaaattccaggctcccagaagtaaagcacaagcaaaccacattgtttacaacagtctggatacagtgcaccactcctaccagttctgggaatggcgggaaccctcctgaaatccagatgtcaggcgagagccaaacttacaagcaggccttgtaaatgacagcagtcaaacctgcttcgttaactcctctgcacactcgcccacaccctggcttccgtccttgtcctgtgacattttcctgttgtcccctcctacccaaagctgtagacacacctggaccttgtccatcaacctcaactgcaaccacctccaaatcacagacttagacaccccgccctttgaccttccagctgtcttgctgaagaaatagctaaaaaaaaaaaaaaaaaaacataaaaaaattcaggccaggcgcggtggctcacgcccgtcatctcagcaatttgggaggccaaggcgggcagatcacgaggtcaggagatcgagaccatcctggccaacatggtgaaacctctgtctctactaaaaatacaaaaattagctgggcatggtggcacatgcctgtaatcccagctactggggaggctgaggcaggagaatcgcttgaaccccggaggcagatgttgcagtgagctgagatcacgccactgcactccagcctggcaacagagtgagactctctctctcaaaaaataaataaataaataaataaataaaaattaaaaagcagtgacctaacccattcccttccttagtaactgtttttagcctggtgcagaactccaggtccagaatctttatactttctccggcttcattagttcccccgtgctttctccaccgccatctccaaccatcctaaactccatgactcactcttcatttatcttgcaaataccctaaactcctttgcttctcttttgagaagctcctgcctagagaaacttcaaccctaaaagcatccattcatccacattgtcaatgtcttcacccagggggttgagtcctgaggacaagaatcacagttgagcaaatcaatgccactgtaaataatgctgattactaccctcaaccttggccctcaactttgtatatttatacctcaaccaggtatatttctttgtatatatatacctcaaccaggtgtatttctgtaatcactgtgcccttaactttgcatcaaaaccagtatatttctgtaatcatctctctgcagtcagcaagtggtcttaccatctatttcaaagacagctggtggctgttggatgaaaacagtttcagacgcttaccacactctaaaccagcctcatctgcatcccaggccctattaaaaggaggtaggggctgggtgcagtggcccatgcctgtaatcccaacacttcaggaggctgaggtggtaggattggattgcttgaggccaggagttggagaccagcctgggcaacatagcaagacctcatctgtacaaaaaatttaaaaattaactgggcttgctggcacatacctgtagtcccagcttcttgggaggttgaggtgggaggatcacttcaaccccagagactgaggctgcagtgagctagctatgattgccgaggcaggtaaatcacttgagcccacgagttcgagatcagccggggcaacatagtgagacccagtctctaaccaaaaaagagaaaggagattattctggggatcctatacctcccactcctgtttaactgtcaggattcctgaagtgaagggagacttcacttctcaagccacttgacctattccactgaaacagttcttggtaagatcaccaacaatctccagtgagcatttttgttttgagacagggtctcactctgtcactcaggctggaatgcagtggtgcgaacacagctcgtttcagcctcctgggcccaggcgatcctcccatctcagcctccagagtagctgggactacaggtgtgccaccacaactggctaattttttaattttttgtagagacatagttttgccatgttgcccaggctagtctcgaattcctgggctcaagtgatctgcctgcctcaacctcccaaagtgctgaaattagcacccagctgtatgtattatcttggttttgtttttgtttgtttacaattttttcccctggagtttctgattggctcttggatgttctctgttacttggaatctattccactctccttgtactcaccaactttctagtttaattcagaccatttcttctttggacagttattttctgtacagcttttgggttttcctggagtttctgaatgtttgttcttgctggtatttgttgcctttatcatattctcaagtttttccaactcctcacccatactataattcagtctacaaaatctcctttttttcatacagactgttcttccataaccttccaccattctgctaagatccaaacaggccaggcatggtggatgataccaataatcccagtacattgggatgctgaggcaggcagatcgtttgagcccaggagttcgagaccagcctgggaaacatagtgagatcttggtgtctaataaaaaagaaaaaaaattgaaaaagataaataacaaataaaacccaaatatattgcttccaggtgtcaacaaagtcatgatcctgagattttgccatcactgctctcctgggctacaattagagttgctggcaccatgttttccattcctttgtttactggaatttctccttagggagctttctagacaggaaggtctctgtcacatcttcttcctcgtttcttttttttttttgagacagagtctcactctgtcgcccaggctggagtgcagcggtgccgtctcggctcactgcagcctctgcctgccagcttcaagtgattctcctgcctcagcctcccgagtagctgggattacaggcacccaccaccacacctggctgatttttgtatttttagtagagacaggatttcaccatgttggccaggctggtctcgaactcctggcctcaggtgatccgcctgccttggcctcacaaagtgctgggattacaggcatcagcctctgtgcccagccccagccttctttgcttatttaacaacaaaacgtcgaagcaattcttatcttagttgctgacccttgatctagcatgcagtgatgttaagtctaatgccaatttgattttttcttttcattgtagattacctgtttcttcctctgtggaaacagcatattatcctttctgttaagaaatgttatgacttctcaagagtgtgggtctttttgtttcactccagtattatgctgggcagttgttaggcccttttgatttaatggtttgtgtcttccctttagcttgggtaatttttttcataccatcctccctgtactttcactagaagtctcttttactcagatataagagctgcccattcggccgggcatggtggctgacacctgtaatcccagcactttgggaggctgaggcggtcggatcactcgaggccaggagtttgagaccagccaggccaacatggtgaaaccccatctctactaaactacaaaaattacttgggcatggtggcacatgcctgtagtcccagctactcgggaggctgagtcaggagaatcgtttgaacgtgggaggtggaggttgcagtgagccgagatcgcaccactgcactccagcctgagcgacagagagaggctccatctcaaataaataaataaataaataaataaatccctgtatctcttagttttttctgctattttctttcctttgctattgttcatcttagtctctttcctgtagtaggctttattaaaatatcagtggattcttggctgtctgtcattagaaggaggcaaacgggtgccctggagctctctgtgtgaccaggatttgttaaccagcagtgtcagctttaaggtagtgatctttattcttgagatttccgaattccagagggctttgttgtaggatgccaatctctccagatcccacagatgtctacagagaagaatcttccttttttttcttttaatcctgatatttatttatttatttatttatttttgagacttgagtctcgctctaacatccaggctggagtgcagtggtgcgatctcagctcactgcaacctctgcctccgggttcaagcaattctcctgcctcagcctcctgagtagctgagattacaggcacgcaccaccacacccagttaatttatccatttatagtagagacagggtttcaccatgttggccaggatggtctcaaactcctgacctcaagtgatccacctgcctcagcctcccaaagtgtggggattacaggcataagccaccacacctggcctatttttattttttttttttttgagatggagtcttgcactttcgcccaggctggagtgtagtggcacgatctcggctcactgcaagctccgcctcccaggttcacgccattctcctgcctcagcctcccgagtagctgggactacaggcgcccgccaccacacccggctaatttttgtattgtaacagggtttcaccatgttagccaagatggtctcgatctcttgaccttgtgatccgcccacctcggcctcccaaagtgctgggattacaggcgtgagccaccgcgcccggcctatttttattttttgagagagagggtctggctgtgtcacccaggctggagtgcagtgacacgatctcggctggctgcaacctctgcctcctgggctcaagccatcctcccaactcagcctcccgagtagctgggattacaggcacacaacaccacgcccaactggttattaaattttttttgtagagatggggtcttaccgtgttgcctaggctggtctcattctggtctcaagtgatccacccacctcagcctcccaaagtgctgggattacaggtgtgagccactacgcctggccctgtgaggtatttttcagcagctttctagactgacaagagcagctggaagcatggcaaccccaggcagagcatagcgtgctgccgcctcgactgtgctcaaggggcgctagcgtgcgggaggagccacctgcctgggcctctggaaggcttctgcctctgagccagcaggtacaacagggaacaagagtgagaaggggacttgaaaacaggaaacctaattgaaggtctgcacaagtagtgaacaaacctgtttctcactgctgcagtcggcatggcttataattaagcagcatactgttacaaaaaacaaacaaaagaaagagtcttggctgggcgcaggtggtttatgcctgtaatcctagcactttgggaggttgaggcgggtggatcacttgaggccaaagagtttgggaccagcctgggcaacacagggagaccccatctctacaaaaaaaaaaaaaaaaaaaaaaaacaaaacaaaacaaaacaaaaaaaacactaaaatattagccagccatggtggcatatgcctgtggtcccagctactcaggaggctgaggaaggaggactgcttgtgcacagaaggtcaaggctgcagtgagctgtgatcataccattgcactatagcctgggcaacacagtgagaccctatctcaaaaaaataagtaaaattttaaaaaaaattaaaaattagccgggcgtagtggcgtgtgcctctggctccagctactcaggaggctgaggcaggaggatcccttgagcccaggaggttaaggctgcagtgagccatgattgtgtcactgcactccagcctgggcaacagagccagactctgtctcaaaaaatatataaaaataaaaaattattttagaaagaaaaatacttgacaggcttattcctgcccaattcaatttataactgtttattcatgtgttgacatcttaatgcagtctttttaaataaaagcaacttcattaagaaagtaaaggaataaaagaatggctactccataggcaaagcagcctttaaggcagtctttttttttttttttttttgagacgaagtttccctcttgtcgcccaggctggagtgcaatggcgcgatctcggctcactgcaaacttcgccccccagattcaagtgattctcctgcctcagcctcccaagttgctgggattacaggcatgcgccaccatgcccagctaattttttttttttttttttttgagacggagtttcgcttttgttgtccaggctggagtacaatggcttgatctcagctcactgcaacctccgcctcctgggttcaagtgattctgttgccttagcctcctgagtagctgggattacaggcatgcgccaccacacctggctaattttgtatttttagtagagacggggtttctccatgttggtcaggctggtcttgaactcccgacctcagatgacccgcctgcctcggcctcccaaagtgctgggattacaggcgcgagccaccgtacccagccagggcagtcttaaaggcaaagaaggtgaacatttgtgcttaatttcccatctagagtgagcaaatctctctgcctctaccctggttcaaagccccttcacctcttgcgtggactatgttaacctcctcattggttatcctctcttcatactgcattcttctgtgccatattctgtgcagaggccagaatgcactttggggaacacaaatctgattgtcaaattctgtcacatgtcttagagaaggcatctaatctggatgccttaagagatggtggccaggcagggtggctcaaacctataatcccagcactttgggaggccaaggcgggtggatcacttgaggtcaggaattcgagacagtctggccaacatggcgaaacctgtctctaccaaaaatacaaaaattagttgggcgtgatggcgcatgcctgtaatcccagctactcaggaggctgaggcaggagaatcacttgaacctgggaggcggaggttgcagtgagcccagattgtgccactgcactccagcctgtgcgacagaatgagactctgtctcaaaacaaaaaagaaaaaagaaaagatggtgtccttctggaagttgtattgccgcaactatggtctgatgggaatgagatcatggtgtcaaacagacccatgctaaggcagcccccaggcagagactcctctccccatggcctcagtactggtctagaactctgagtcatagatctaaaaataagtcacagggctgtgagctagcaggacagctgcacacctctgggtctgtggcaagccagtggtccgcagtggggatgccctatgtccagcactgctgctgctccttcgtctagaggccttccttgaccgataaagcaagcaatgctgggtagcccacaccccctataactttggcctggaggtgtccctggatcagatgcctgtctgagtctggcttccagactgtcaatggcttgctctgcagctttcaccaacccaggtcacgacttgtgcttacaacacctctttggccgggcacggtggctcatgcctgtaatcccaacacttgggaggcctaggcgggtgggtcacttgaggtcaggagttcaagaccagcctgatcaacctggtgaaatcctgtctctacgaaaaatacaaaaattagccatgcgtgatcaggtggcacgcacctgtaatcccagctactcgcgaggctgaggcaggagaatcacttgaatccaggaggcggaggttgcagtgagccgagatcgcaccactgcacgccaggctgggggacagagcaagactccgtctcaaaaaacaaacaaacaaaacacctcatgtctgggccagcctgctttcctcctcttttagctggtacttggtttaaatctggaaatcctggagtctttggaattccattgacctgagctgggttactgtcctggtgtctgtctctagcacggttggaaggtaactgttcttatgaatggaaaggaggtgttggtgtcagatgtgtttatagttgcattatctcaacttgaacttcgtcttgttctcacctaacttgaggaagcaaggaaatttggaattcaaatattctaataatatttgttattaagtgaggacattcaaatcatacattcaaatattagtaatgtctgttacagcaaactaccagaaaaggacagcaagctacagatgacctggcaatgatgagcccatagggactgttagtgggaaggctgacagttcctggcacgagccccagggtgccttctagagcaggctaacatcttctcacacttgatcccgcccctgctctcccatgcacaaacggggtgtgcaaacagtctgtttagcttttcaaaaataaagaggaggccaggcgcggtggctcatgtctgtaattccagcactttgggaggcgcaggtgggtggatcacttgagctcaggagttcaagaccagcctggccaatgtggtgaaagcccatctctactaaaaatacaaaaattagctgggtgtggtggtgtgtgcctgtaattagctgggattacaggtgcgtgccagtactcgggaggctgaggcaggaaaatcacttgaacccaggaggcggagattccagtgagccgagatggcgccattgcactgcagcctgggcaagaaagcgagactctctcaaaaaaaagaaagaggagctgtccaggcgcagtggctcatacctgtaatcccagcactttgggaggctgaggtgggtggatcccttgagatcaggagttcgagactagcctggccaacatgatgaaaacccatctctaaaaatacaaaaattagctgggcgtggtggcatgtgcctgtaatcccagctactcaggaggctgaggcagcagaatctcttgaacgggggaggcggaggttgcagtgagccaagatcacaccagtgcactccagcctgggcgacagagcaagactccgtctcaaaaaataaataaataaaataaaataaaaataaagaggagattaaaattctcagcaaactagaaacagatggtaacttttttttttttttttttgagacggagtcttgttctgtcacccaggctggagtgtaatgacgaaaacatggctcactgcagcctccaactcctacacttaatcagtcctcccacttcagcctcccaagtagctgggaccacagccgtgtgccaccatgcctggctaatttttgtattttttgtagagatggagttttgccatgttgcccaggctgttctcacactcctgggctcaattgatcctcccacctcagcttcccaaagtgctgggattacaggcgtgagccaccttgcctgccctacaattaagtaaaatatcaaaatacagaaacatcatttgtttctgtctacaagcaacaagtaattagacaatgaaaagtcaaaacattgccatttgtaatagtaccccaccaaaacaataaaatacctagcaatctaatgaaaaatgtgcgaaaaatgtgcaagacttctacactgacaactgcaaaacactgttgggaaaagagcatatcttcaagaccttggagtaagcagagaggacacaaaaagtgatcatgtctttgaggctgaggtaggaggattgcttgagcccagcagttcaaggctgctgtgagctatgattgtgccactgcactcctactggacaacagagtgagaccctgtcgtaaaaaaaaaaaaaaaaaaaagtgactgtctgcaaacaaccccattaccccctccaccaccaagagcacttggctgtgaaaacccctttcctgaaggctttaagatattcccactgaaactaacatgtaaaacccagcctagaagccctgacttttatttccataaagaatgcacaagccaacagtaataactttggctacctaagaaaatcagttctggaatccccgaggggccctgtaagtgggatgttctgattctgcagcttttctgacaataggaatgtgaagcccttagaaaagccagccggagcaaatctgctttttttctcagcagggagagccagctcctgctgagatcagggtacattttctttctttttccttttctttttttctttttttttttttttttgagacagagtctcactctttcccccaggctggagtgcaatggcgtgatcttgactcactgcaacctccacctccccggttcaagcgattctcctgcttcagcctcccaagtagctgggatgacaggcacctgccaccactcccagctaatttttgtatttttaatagagatggggtttcaccatgttggccaggctggtctccaactcctgacctcaggtgatccgcccgcctcagcttcccaaagtgctgggattacaggcgtgagccaccaggccgggccttcttttttttttttttttttttttgagatggaatctccctctgttgcccaggctggagtgcaatggcgtgatctcggctcactacaacctccacctcccagcttcaacctcttctcctgccttagcctcccaagtagctgcgattacaggcatgtaccaccatgcctggcaaatttttgtatttttagtagagatggggtttcaccatgttggtcaggcttgtcttgaactcccgacctcaggtgatccgcctgcctcagcctcccaaagtgctgggattacaggcgtcagccaccatgcccggcctagggtgcatttctttggcatctctcacaaatgtgggtctcgttcatcccagctcttgggtcacagaggagctcctgaagcctccttccactcatttgtcataggcaccaacctcagagacgctcatgtttttcacgggacccggctctaactctgcctctatccagatgcacagggggccagatgcattccggagtgacccctgtttcctggtcttgaccttcttggcctcctaaacagcaaattacaggtataggtctggtggtctctaaggcaccatctcatgcctgtgtggatgctgagggtccagttcacagacctttctgcagagctggaaggccgtagctaccattcctgaagatgagggcctggcctccatctttagacctgtgggctccatccctttttctcttttctcttcccttctcttttttctcttcttttccttcttttcttttctttctcttttcttttcttcttttttttttttgagacaaggtctgactctattgcccaggctgtagtgcgcagtggcgcaatctcagctcactgcaacctctcactcctgggctcaagcgatcctcccacctcagcctcccaagtagctgggactacaggtacatgccaccatgccaggctaatttttgttatttattattattattattttttgacacggagtcttgctctgttgcccaggctggagtgcaatggtgcgatcttggctcactgcaacctctgcctcctgggttcaagcgattctcctgcctcagcctcccaagtagctgggactacaggcatgagccaccatgcccagctaatttttttgtatttttaatagagacagggtttcaccatgttggccaggctggtctcaaactcctgacaattgtgatctgcccacctcagcctcccagagtgctgggattacaggcatgagccaccgcacctggcctaatttttgtgttttttgtagagacagggttttaccatgttgcccaggctggtcttgaactagtgagctcaaacaatcctcccacctcggcctcccaaagtgctgggattataggcgtgagccacagcatctggcctccatctttttttctcaacactttggtgcaaggaacttgaaataaagaggtggcatgacatgacgagtgcctcaaacctgtgtagtgggtacatttttttccctccttctccatatgtatgtgtatttgatgaattaaaataaataatttgaacctgcagggcatgggtataatatctgcagatggactcacaaaacagaaggtgatatgtccacaatacaaaatgctctcaggtaagcttgagaggttcaaggccatctggtccccaaagcaccacaaaggccaccaaaagggccccaaggttgacaatgttcacactgatctcagaactgcatatatagctgagtggttctccatgactcctggcccacggaaggggccaaaatggtgtgagcataagcggtttctggcacattactctggggccatgaggttcggggtaaagtgagccgcagcttttacatgttagtttcagtgggaatgtctgaaagaagagccttcaggaaaggggttttcatagtcaagtgctcctggtggtagagtgggcaatggggttgtttgcagagagtcacttttttttttttttgagacaggatctcactctgttccccagcaggagtgcagtggcacaatcatagctcacagcagccttgaactgccgggctcaagtcatcctcctccctcagcctccccagtaactgggactacaagtgggcgccaccatgcccagctaatttttgaaattttttgtagagctggagtctcactttgttgcccaggttggtcttcaactcctagcctcaagtgatcctctcacctcagcctcccaaagtgctggaattacaagtgtgagtcaccgcactcccctgggagcaaattttagctttcctggtctcccttgtgcaggatgtgaaagctgtgagataggctgtaagccccaggaagggtagctgcattccagagtctgcaggatttgggaacaggcgtggacatggctggccagacacacgtgggcaggtgtgtcagagtctgccccatggggaaagggccaatttaacatctcatttgtgactggttgcggtggctcacgcctgtaatctcaccactttgagagaccgggctggcagaccacttgagctcaggagttcaagactagccttggcaacatggcgaaatcctgtctctacaaaaaatacaaaaactagcctggcgtggtggtgcatgcccatagtcccagctactttggaggccgaggtgagaggatggcttgagctcaggaggtggaggttgcagtgagccaagatcatgctactgtactccagtctgggtgacagagccagaccctgtctcaaaccaaccaaccaacccatctggtgtttaccaagtgcatccaggtatggtcactgatggattctatggcaaggtccagtggcccctggggcctgtagcaagagctaggaggacctctgaataacagatgggcttatctgagactgtaggagctacaactggcacactcaaaagccagccgctggccagcactttgggaggctgaggtgggaggatcactcttgagcccaggagttcaaaaccagcctaggcaacatggtaaggggccgtctccaccaaacaaacaaacgacaaaacttgccaccatcattcctagctccttttccagcctacaaaagcaagaggacactagcacccaggcacacttcctccaagccagctgtcctcttccctcttacaactctcctcctgtggctcgggtcctacagcccagcccctcatctcaggaacactcttgccctactctccgttactcaaccttctgaagaatcattgctccaccttcttccctttcacctaaaagctactggacaagtcccttagtagaaaggagatgtctacaggccagcacgatggctcacgcctgtaatccctgcactttgggaagctgagcagggcagatcacctgaggtcaggagttcgagaccagccttgccaacatgatgaaaccccgtctctactaaaaatacaaaaattagctgggcgtggtggcgggtgcctgtaatcccagacacccaggggctgaggcaggagaatcgcttgaacctggtaggaggaggttgcaatgggccgagattgcaccactgcactccagcctgggtgacagagtgagattccatctcaaaaattgataaacaaataaaataaagaaagatgtctatagttgtcaacctgcagtgaatcctcagtactactgggaaattctaccatgtttcttttgtccactcacctttgtgcttccagacctttcccactcccctcactctttgctgcagtctaaggtaaacctaccaccaagcattttatttatggatttatgtattttgagacagagtctcgctctgtcacccaggctggagtgcagtggtgcaatcatggctcactgcaactttgaactccctgggctcaagtgatcctctcactccagcttcctaagtagctgggactacaggtgtatgccaatgtgcctagttaatttttgtattttttgtagagacagggtttcactatgttgcccaggctgatctcaaactcctaggctcaagcaatgagcccaccttggccttccaaagtgttgggattactactgtgagccaccaggcccgatcccaccaagcattttagatcccctccttcaagccttttcagaaccttcacaagaagaaccagatcatctctctcctatatcctcagccactttcaaccagatcttcctctttgaccttaaaacatgtttaagtctcttctaccttaaaaaagcaaccaccaaggccaggtgcagtggctcacacctgtaatcccagcactttgggaggccgaggcggtggatcacttgaggccacgaattcaaggccagcctggccagcatggtgaaaccccgtctctactaaaaatacacaaattagctgggcatggtggtgcgtgcctgtaattccagctactcgggaggctgagacaggagaattgcttaaaactgggagggaggccgggcacagtgtctcacacctgcaatctcagcactttgggaggccgaggcgggcggatcacgaggccaggagatcgagaccatcctggctaacatggtgaaacaccgtctctactaaaaatacaaaaaaaaattagccgggcgtggtggcgggcgcctgtagttccagctactcaggaggctgaggcaggagaatggtgtgaacccgggaggcggagcttgcagtgagccgagattgcgcctttggactccagcctgggtgacagagtgagattccgtccaaaaaaaaaattcaaccaccaagaaaggtatcccctcaatctacactgacatctccagcacatacctctcttctaagctccagatcctcatccccaagtgccttattggtgcctcttctttgatgccatgttcacactggaactcgggccattcttcccatcctccaccctcccaaatatggtcctcttccggggcttcccaaaacaatgagtgccagcactacaatggctcatcccagagacccaggagacattcatgattcctacctcttcctcaccctccatatccatttcaccactgattttacatcaattttattccaaaatctttctcaaatttgactttcttttttttttccatccccattgccactaccatagtccatgaatggttttcaaagggaggttcatgtaccccatagtatgggaaggcaatccattgggatactgggagaaaatattagaacttctacatttctttcttttttttttttttttttgagatggagtctcgctctgtcacccaggctggagtgcagtggcgcaatctcggctcactgcaagctctgcctcccgggttcacacagttctcctgcctcagcctccagagtagctgggaatacaggcgtccaccaccacgcccggctaattttttgttgtatttttagtagagacggggtttcaccatgttagccaggatggtctcgatctcctgacctcatgatccgcccacctcggcctcccaaagtgttgggattacaggcgtgaaccactgcacccggcctcttttttttttttttttgagatagattctcgcttcatcgccaaggctggaatacagtggcgtaatctcagctcactgcaacctctgcctcccaggttcaagttgttctcctgcttcggccttccaagtagctgggattataggcctccaccaccacgcctggctaactttttgtatttttagtacagatgggatttcaccatgttagccaggatggtctcgatctcctgacctcatgatccgcccacctcggcctcccaaagtgttgggattacaggcgtgaaccactgcacccggcctcttttttttttttttttgagatagattctcgcttcatcgccaaggctggaatacagtggcgtaatctcagctcactgcaacctctgcctcccaggttcaagttgttctcctgcttcgaccttccaagtagctgggattataggcctccaccaccacgcctggctaactttttgtatttttagtacagatgggatttcaccatgttggccaggctggtctggagctcctgacctcaggtgatcctcctgcctcagcctcccatagtgctgggattacaggcatgagccaccatgcctggcccgtctctatgtttttgactactctaggtaccttatgtaagtggaatcataggatatttgtctttgtgactggtttcttttggcataatatcttcaaagctcatctatttgcatcgtagctgggattataggcatgcgccaccacgcctggctgattttgtatttttagtagagacggggtttcatcatgttggtcaggctggtctcgaactcctgacctcaggtgatccacgcgccttggcctcccaaagtgctgggattacaggcgtaagccacggcgcccggcctccttcaacgctgagtaatattctattgttatgtttataccacattttgtgaacccattcacccgtggatggacattgggttgcttccaccttctgactaatatgaacatgggtgtacacatttatatccactcttgcctcccctccgtagtccttccttctccacactgcatctagagtaacccctttacactctcaagtatggacaaatcacctcttgcttaaaactcattagttttgcaacactgtcaagtaagacctaacttctcaccactctgatttattattggaacacaaaactgggccatgctccgtggctcaagcactttgggaggccgaggtgggcggaacacctgaggtcaggagtttgagaccagcgtggccaacatggggaaatcccgtctctactaataacacaaaaattagccgggcgtggtggcgcacgcttgtaatcgcagctatccgggaggctgaggcaggagaatcacttgaacccgggaggtggaggttgcagcgagccaagatcacgtcactgcactccagcctgggcgatagagcaagactccgtctcaaacaaacaaaacccacagaactggaagacccttgctgctgcttctgcgtaatgtgttctcctcccttctcgtttttttttttttttttctcccttctaccccttaggacctcagctcctgctctttccctgggggaattccggatcactctcctttactaggtcagggtactctctccctccctcttactctttcccctcctaccacttgtcaccattggtactatattatcacccggatatgtgacaatggtattgtgtatttaccactaaggaataaacttatgagggagagagcactacccgttcctgcagtgcccgtcggggcctggcatctaggaaacactccatacgccagtaatcgatttcagtcaatttcagtaataaatccaggaggacgcagcccgacccctcccgcccgggggccaagccatggtgggggatctgggtggacctccggctctggccgccagtcctcaacctccgccccggccgtcccgcttgggggcccagggtcccaggagaggaggctccggggcgccccctcccctctaatgcgagaggagagtccgctctaggcgcgggatccgcaacctccccgcgtccgcccgaggcgggggcggggccggaccggagacgtaacttccggtgtacacagccggtccaaggcggtgcgctgggggccggggcgcgtcgcaggtgaggagcgggcgcggcgggcgcaggcgggggctggcgggcggggtcgggcggtgggcggtgggcagcggggccgcgggccgcagccagggcagacggcgagacgggcccgcggggcgccgctccgctcggggccgcagggcgcggggccgtgggctcccgccccttgcccgcccgctgtggaggacgccgggctttgcgggcgctggccggccgacggaagcccggaggggcctcctggcgcgaacccgggacctgggggcgcgtcggagactcggcggccgcggcaccgcaggggcgggtcggcgcccgtcaggcggggaaaggggacgctccctcggttcgccggggcccgggaggtcgcgctggcgccaggacccgctcccggaagcccgcggagggagggcggcctgctggcggcaggggtccgctggggctagccggggaggcggccctcacgccatcccggggctgccgggcgggctgcgcgcaccttcccggcggcgccaggctgccgaggaacgcgcttttccggccctgcggagccagctggcgcattgggcccgaggggagggtccgcggggaccgggagggccggggctgagcgtggaggacccgagcccgagggacgagcgcagagtcaggggtgtgtctttctgcgccgcgcggtgcgaggaaagaagcgtgcctggttggcatgataagaattttgtttagactttttagaaattttccagagactcagctttgggggcctccagtttgaaaataccttgttctggtccctcatccccattataaaagcagttaattctcctttcctggcaaaacactcaagacgacacaaaaagtcttaaggtagaaaatgacagtcatctgccagtctaccattcagtgacaaccactgctaacattttggtgataatcaataaatacagataggtattgttatttttatggactttacagtatgtgatttaaccaccgatgagcattgagatagtttccaatttgtcacaagataaacaattctgccggaaggatttgtttgatatggtcttttttttttttttttaataagagactgttgcccaggctggtctcaaaacttctggcctcaagcgaccctcacgccttcgccttccaaagtgttgggattacaagtgtgagatattacacctggtctgattgttatcttagaataaatttacaaatggggtcaaaggtaactttatttgtttttttttgagacagtctccctctgtcacccaggctggagtgcagtggcgggatctagattaactgcaaccttagcctcccgggttcgagcgattctcctgctttagtctcccgagtagctgagattacaggcacccaccacgcccggctaatttttgtatttttagtagagacagggtttcgcccagttgaccaggttggtctcgaactcctgacctcaggtgatccgcctggctcggcgttccaaagtgctgggattataggcgtgagccaccgtgtccggccgtaacgttcaatttttaagaatacatagtatttgttttcctttgacatatttggacaatttttctgtctctttgtcataaaaaaaaattccagcctggcgcgatggctcatgcctgtaatcccagcactttgggaggccgaggcgggcggatcacttgaggtcaggagttctagaccagcctggccaacgtggtgaaacccggattcaactaaaaaaatacaaaaaaacacattagccaagcatggtggcgcgctcctgtagtcccagctacttgggaggctgaggcaggagaatcgcttgagcccaggaggcgaaggttgcagtgagccgaggtcgtgccactgcgctccagcctgggcaacagagtgagactccatctcaaaaaaaaaaaaaaagaaattcatgtttgcgtctcatcgtttcatggttttatttttttgcctttagtctacctaaaattcattcttggtttaaaatatgaaatattttgtaaatggctagtcagttccagatttattgaataatatgtaagctttatcattttatcatattttagactaaaagttctaagtgtatgtttgtaagggctacttacaaagttcatatttacattttgtgtgtgcttagatgttttcaagtgtctttaaaaatcacagtattttcttttcacagtatcttcacaatattttgttttaaaaagaaatcattttccaatacaagtacagggaatatttcatgtttgagattttttttttctttttaaagcaaaaagtttagtttattgccgtttcatttgctttcttgctgacaagataacaaactccatatgaagagttcaggtttgttgtggcaacttttcagtgtggcatttgagattctaatcttcctctatttttgcacacaaatacgtaggttggcattggagaccaagatagaaaagttctcagattcccttggcaagcctagatttttcaatctaaaattatctccagatgtttggaagaccatgttttaagcatccttttttttttttttaagcaaattgcacatgattctgtgaaaattttagtaaatgtttgttctgttgaaaacctatagcctaatacatcaggatccatgtgtcaagtgggtcttccaagtctataggaaataattgtttctgaaagctagcaggctgggatatcacatgggttgggtgtccactctctttttttttgagtcggagtctccctctgtccccgaggctggagtgcagtggcgcaatcttggcttactgcaacctccacctcccaggttcaagcaattcttctgcctcagcctccctaggagctgggatcacagttgtgagccaccacccctggctaatcactcttttttcctcctgtaactttgtccttagtgaaaaatgatgatcttcctaggtaggcaaaaaaatgttggtttagataaggaattgatttgttttggagttattgaaaagcaggttgccgttttctctgaagtgtaagttcacagagagcctgaatgttgtgtttggattaaggaaaaacagcaacaggttgtgcttgtgcttcaaatgtctttaactctactgaaactgccctcttgagggtcccctaactgatgcatgcagtggccattgcttaattattttccttgactttgatctcaggtatttggcatggtgagctattctttcttgctctcgtgaatctcccattgattggccttcttttttctttttcttttttttcttttttttttttttgagacagagtcttgctctgttgcccagactggagtgcagtggctcggtctcagctcactgcaacctctggctccagggttcaaacgagtctcctgcctcagcctcccgagtagctgggattacaggtctgcgccaccacccccagcaaatttttgtatttttaatagagatggggtttcaccatgttggccaggctggtcttgaactcctgacctcaaaagtgctgggattacaggcgtgagacaccacgcttggccttgattggccttcttgacttggaactagtgtggtcatttcctgaaatctgtgactgcactttctcatttgtctttactgcttctcttcatacatctaccttggggcattttctgaagcctagttttgtacctcttacccccgctccaaaacatattccttcccacttatccagtatatgagtcctgggtagagaaccacctcatttccttacctctgccaccacttagtgacccccgactcagagttttctgcaggtcaattctttttctcctgttcagtaacccctggacatgttcctgaggccatgctttctccaggtgaagaaaatatcacttctggccgggcgcagtggctcacgcctgtaatcccagcactttgggaggccgaggtgagcggatcacgaggtcaggagaccgagaccatcttggctaacatggtgaaaccccatctctactaaaaaaaaaatattaaaaaattagccggacatggcgatgggcgcctgtagtcccagctactcaggaggctgaggtaggagaatggtgtgaacctgggaggcggagcttgcagtgagctgagatcgtgccactgcactccagcctgggcgacagagtaagactccgtctcaaaaaaaaaaagaaaagaaaatatcacttctttgcgaggacaaggtgagaggattacatgctctcaggagttggagaccagcctgggcaacatagtgagacctctgtctcttaaaaaaatgaattttaggtctggcacaggggctcatgcctgtgatcccagaagtttgggaggccaaggtgggaggattgcttgagatcagcctaggcaacatagtgagactccaaaattatctaggtgtggtggtccatgcctataattccagctacttgggaggctgaggccggaggattgcttgagcctaggaggttaaggattcagtgaactgtgattgtgccactgcactccagcccaagcaacagagcgagaccctgtctcaaaataaataagtaaataaataaataaataaatatcacttatcaaggtgtcctgtccttcctgactcttaaggttcttaccagccggtgaatcacatcttccttcttgatatggattgtatttgccatttgctttctatccctacacctcgatttagactttgtaccttttcttaagggatttcaggcttaacgtggtcctactctggatgtgaaagaggagacccagtgaatttactcaagaattgagttagctcacatttatggagtacctacagtacagcccagttactttactggaagatcagaatacagagctggacagcacatcctgggaagaatgccaaataagcaattgtcataaagtattataagtgcctagaaggggagtcaccaagtaacctctcccaggtttcagagatcttgcgtgtcttatttactgctttgatctccagggcctagaacacagtgcgtggaaatgatgaagttttttttgtttgtttgtttgtttgttttgtatttcattcagtttaatgaggggacatgaggagccaggggcagaatgatatggttaggctgtgtcctcacccaaatctcatcttgaattgtagttcccataatccccacatgtggtgggaaggacctaatgggaggtaatttaatcatatgagcagtttcccccatgctatgcttgtgatagtgagcaacttctcacaagatctgatggctttataaggggcttcccccttcacttgggtctcattcttcttgctgctgccatgtgaagaaggacgtgtttgcttccccttctgccatgaatatgttttctgaggcctcccagccctggggaactgtgaatcaattaagcctctttcctttataaattacctagtcttgggcatttccccatagcagggtgagaacagactaataaaccttattttaagaaattgccacagccaccccaacctttagcacccacactctgatcaattagcagccatcaacatcacggcaagaccctctgccaacaaaaagtttaccacttgctgaagatgcagatgatcattagcattttttagtaatgaagtatttttaaattaaggtatgtgcattgtttttgtgacaatgcgattgcatacttaacagactacaatatagtgtaaatataacttttatatgtacaggaaaataaaaaacatcatgtgacttgcttcattgcgatattcactttcttgaaatgatctggaatgacacctgcaatatctccaagataagcctataatatcttttcctgataattttggctatatacttcttgatcaccttttctatgacaaggatttggtaatatcatttttttatttttattttattattatactttaagttttagggtacatgtgcacaatgtgcaggttagttacatatgtatacatgtgccatgctggtgtgctgcacccactaactcgtcgtttagcattaatgaagtatttgttgaaggaatgaatgatcatctgagaatgaaatcagaaaaaatgtcatacacattagctatctatagaaaagatataagtcaaaagatatttcgtaaatgtagtttgaagaatctcagggaaaactttaaattcaaccaaactgacccagctataaccccaggaaggcatgcatggaatgtgtttgtagctggaaagcttaaacttaattttgtatcctcagaagaaatacttgtgtttctgggagaggattgggacagtgtctggaaattggggtggcgggtccaagagaggaattacgtggtgtgtgtgtagcactctctgggggcctgaccagaggagcagtgcagcgttccctccacaaagccatctgcactaacacacagatgggcgtgtccctgttgttgcctctggctgcaagggtctctcccttgcttagcgtctgtcctcccagtaccatctgagtagaagatagctgcacgtggagatttcttggtaaggagagaatgtgagtggttgagggctctgcatctaagctgcttggatcagatcctggtcttgggatgctggctaatctttcagttttctgatttgtagaatggggataatagtagcacctttctcttagtgttgcagtgagggctctgagcgtgctacccggcacctgtgataagtattcaatgacagtattagctctcgttggtattcataaagtagtaactggcctctggttcatacatcagttttctttgagcttagatagcctaaataattaatccccatggaactgcttgcttctgggtgcattgaataagctgataaacagacactgggaagtaatgacagataagctcttcctacactgctcatccagggaatccagcctgcagttctcaggggagacttctggagaaggctgttcttgagctgagtactgtgggaaaaagtaagtccagtgccacagcaagaggggaggactcttgggcaggggcatgacacgtccaaaggtgtggaggtgagagcaagcatgaggtatttgagctgcaggagattgagggtagagtctggacaggtatgaataaggagtagagggaaatgacattggaaagtgggagcagtccttgaaataactaataacaatgtctaactgggcactaacagcacttcaggtcctgtgctgagtccttcgactcactgcgctaaccaggtttgatgctgagagctttgtctacattgcattgtttaatcctcacaacaaccctttgatgtaggtacttacctctggtatgtgtggcatcatgtcacatgtcacctggtaggtctccctgcctttttttttgaaatggaatcttgctctgtcaccctggctggaaggcagtggcaggatctcgacttactgcaacctctgcctccctgggttcaagcgattcttctgcctcagcctcccgagtagctaggactacaggtgagtgccaccatgcctggctaatttttgtatttgtaatagaggcggggtttcaccatattggccaggctggtcttgaactccttaccttgtgatccgcccaccttggtctcccaaagtgctgggattacaggagtgagccaccatgcccagctgctgcttttttttttttttttttttttttttttgaggcggagtctctctctcacccaggctggaatgcagtagtgcgatctcagctcattgcaacctccacctcctgggtcgaagcaattctcctgccttggcctcccaagtagctgggattacaggcatgcgtcaccacgcccagctaatttttgtatttttagtagagatggggtttcaccatattggctaggctggtctggaactcctgacctcaggtgatccgcctgccttggcctcccaaggtgctgggattgtaggcgtgagtcacctcgcctggcctctgcttcttgattcagcctgcacatggctgccaagataactcccagtgtcttatatatgtttaaaagctttttgtgatcctgtttcctgatgaagtccaagcacactaagatcctctgacttcatgaaaaaccacgaagttaaaatgtaaaaatatttatatcttagaatttaataaaaacaggacaggtgcagatgtggatcaagctcagagaaatcagtgaaagaagcaaggtacagaacaatgtatgtttgcccatttgtgtttttctaattttaaaaaatttctccacttttgaagtaatatgagctcatttgtttaaaaaaatatatataggccaggcatggtggctcacgcctgtaatcccagcactttgagaggctgaggcgggcggatcacctgaggtccagagtttgagaccagcctgacaacatggtgaaaccccacctctactaaaaatacaaaaattaactgggcatggtggcgggtgcctgtaatcccagctgtccaggaggctgcagcaggagaattgcttgaacctgggaggtggaggttgcagtgagccaagatcgtgccactgcactccagcctgggtgacagagcaagattccatctcaaaaaataaataaataaaaataaaataaataatgtctccctctctcgatagagagatagatagatagatagatagatagatagatagatatacatgaaataggtttataagtgcagaaataatttatggaatgatagaaaagaaacagtggttgtttttgggatgagaccccagaaaaccaggctgttaggctgagttagctttttctttgcataccattttgtatggtgtgaatttttttccctgtgtatatgtattttcttttttttctttttttttttttgagacagagtcttgctctgttgcctaggctggagtgaagtggtgcaatcttggctcactgcaacctccgcctcctgggttcaagcgattctcctgcctcagcctcctgagtagctgggattacaggtgcccgccactacgtctggctaatttttgtatttttaatagagacagggtttcaccatgttggccatgttggccaggttggtctcgaactcctgacctcaagtgatccatccacctcggcctcccaaagtgctgggattacaggcgcgagtcaccgcacccggtctatgttttcattttaacaataacttttaaaataaatgtctatgatggacatggctgttgtgtagagtgaatgtagcatggaggttaagagtgaggactgtgcaaggcggcttgggttcaaggcctgcccctgccttgacctcagtttacctcctctgaaaatggggaggtagtaatacctgcctcctggggttgtagtgaggcattactgagttaatatttgtaaagtccttggaacagttcccaggaggtatgtgtttgtcgtcgtctctgttgctctgtccctgtgctatgcatgaccgtaagtgtaaagatgtgtccagcctctgtctctgatgctcccagttcatttggaaagggagagcatgcagctaatgacagagacagcagaggctgcaggagtcagaaaggctccttgggaactgaggtggcccaagatggtttcatcaaaatgatggttgttaaatatgggtaatttctagagggaaaataacacaaagggactttttccatgttgtgtgtcccagccagcctgaggcaggcagaggagtcagaaacaggacaagagctttgaggaggcctgaaatttggacgtgtcatgtgatgacatgtctttttttttttggagggggggacggagtcttgctctgttgcccaggctagaatgcagtggcatgatctcagctcactgcaagctctgcctccccggttcacgccattctcctgcctcagcctcctgagtagctgggactacaggtgcccgccaccatgcctggctaattttttgtatttttagtagagacggggtttcactgtgttagccaggatggtcttgatctcctgaccttgtgatccgcccacctcggcctcccaaagtgctgggattataggtgtgagccaccacgcccggctggcatgtcattgttatatggcagagtttttcttggcatatatgagacaatgatatgatttgtaaatggtgacatctttgactcagtgaagtgtggttgctctgccttgatgtttggaatggctatgaggtgttctgtgtgacgtatttaacaatcctcgtaatgcagggcacgtgggaataaccagtgttgccagtgagtgttcttgacgcaggcctctacattaaccgtgagtctgttctaggattcgtgcctagatagaatattgcttttctttcttttttttaagtcattttgattatgttccttgtgtctgggccactgtcagttaagtgtgttttcaaattggcagtggcaaagaatcataatgggaagatttttgaaagtggaattagagcaagatattacctgaaaaaaaatctgattttcttactaaaaatgattttgggattaagtactagtgagatgctaattatggccaggaaacctggaaataactcgcatcttccctcaccccacccccggtccccgaggtggatatatgttcatgggaacagagtttggggaaagctggcttggctcccagacttgggtgccgcaggctctggtgacctaggcaggaagaggcggaagtggttcctctcaccagccacaaggacctgtgctgctcctgggtgtcaaggtgggagagaatgcgctacatccttgtgcttgagtcactttgtaatgtactttgtaattccaggtgatgcccctcctcaactgtgtcccttctgttcctgcctttggcttggggttgaaagaggagggagtggtgggcacggaaatgggaggagccatgacctctttcccctccagcgcatagggcattacttcttttagtttgttgcctggacttgggagttgggcccagagctgcaggaaggtaagttttatttctgaaagttgttttaacttacagattttgggggttcgagggagtttgttttcgactagtagaagacaagaattaagaattgcagtggaagatgaaatgctatcttcttactaatccacgccctctttcagagcagtagctttcatttacggagactgagggtatggcagaggctgtgctttatggatttaatcctcagcagtactgaggcacaagagttaggcgacttgctcaaagttagtaagtgccatttattcagctgatatttactaagagcaggaattcacatctagatcagtctgattcccatacccgtaccagtaactactgcattttggaagtgcgtcgtttccatgaagtttctttgtattggagcatctacctgaaaggcaagggcctgagcattttctccttttcccttattaacggtaagctccttgagagcaagcattatgtctgtctcttcaccactgcatcctgggttcctggagcagtgctatgcacttaggagaaccttagtgaatgtttgagtatgtgaaggctcatggcgcagataagtggcagagccagaagccagcctggaggtgaaccactgcgggcctgctctctggggctgtcttccctgcctagcgagtggatggtgaggaatcacctagaattttctcatttcttaatgtttgacctgatgaaatattgggaagaatgagcttcctggctgtgactctgattttctgttgttttttttgagacaggagtctcgctttgtcacccaggctgaagtgcagtggcgcaatctcggctcactgcaacctctatctccggggttcaagcgattcccctgcctcagcctcctgagtagctgggactgtaggcgcatgccaccatgcccagctaatgtttgtatttttagtagagatggggtttcaccatgttggccaggatggtcttgatctcttcacctcggcctcccaaagtgctggaattacaggtgtgagccattgcatcaggcaactttctggtctttttgagggatgggaaggtttgctgggtatgcaaaattggagtcagtgttctcagcttggaagagatgttataatttattgatagaattttttatggatgccttaaattctcagaaatgattttgaatcttaagtttatctaaaatttatataatccttctccatagtgagaaaaaaatttctaaattatagttcgatttacctatttatatataagcttctggataaatacttgtttttttttcctccatttgaggttaattttggataggttccatagtgcaaagttgttaagagtggcagtatagaatttttaagttttcttgggccagacatggtagtttatgcttgtaatcccagcactttgaagggccgaggcgggaggatcgcttgaggccaggagttcgagaccaacctgaacatcacagcgaaaccccatcttctgcagaaaaatttaaaaattacccaggcatggtggtgtgtgcctgtagttccagctacttgggaggctgaggtgggaagttgcctgagcccgggagatcaaggctgcagtgagccgcgatcacacaactgcagtactctagccttggcaacagagcaagagactgtaaggtctcactgcagcctcaatctccctggctgaaaccatcctcctacctcagcctcccaagtagctgggactacagatatatgccagcacactgggctaatttttttttgtttactttttagtagagtcgaagtcttgctatgttgcccaggctggtcttgagctcctgagctcaagcagtcctcctaccttggcctcccaaagtgctgggattacaggtatgagccaccgtgcccagccaagaccctgtctttaaaaaaataagtaaaaacaaaaacaaaaaatagaattttaagtcttcttaaataactttctaatggacacaattagttttcagtaatccaaccttttttttagaagttttgaaaacttttttttggatacctgggcttttgcacattgtaccacactgtaacaaaaataaaccgcaggtttctaactggtgtagactgttgatttttttttttaacaaattaggtttgaataaattatataattgctttgtggtttttttgtttttttttttttgatggagtctcgctctgttgcccaggctggagtgcagtggggtaatcttggctcactgcaacccctgcctcccaggttcaagcaattctcctgcctcagcctcctgagtagctgggattacaggcacctgccaccatacctggctaatttttgtatttttagtagagacggggtttcaccatgttggccaggctggtctcgaactcttgacctcgtgatccacccgccttggcctcccaaagtgctgggattagaggcgtgaaccactgcacgtggtgctttgtgtttttttttttttaaatctacttagaaataaattattttcaccccctgatttacacttgaatttccactagcaacacaatttgttgtcacaaatgttttcatagtacttgggcacatttgatgcagaaatttttaatggtccaagactattttagttgatagatgaaaccttccttttacctgaacaaactttttcggaagtttaggagccagctttgttcatcctttggtgataggtggtggtttgtatgtgtttgtagacaaaactttccttggcggggatttgccccttttttcgttgtttcttcttcctttgaagatctctgtttaacaaagattttttttttggctcacagtgttcctgtaatagaattccttcaagagttctaatactagttttgttttgttttgatggcagcaggttttgagagtgagcttttgacttcataagaagactaaaacaacagtcttagagtacagttaagtccatttgttaccagaaaatcagacagacagctaggtctgtcctcatcaggaccaagtaatactggatttttttttttcattaaatgttcactatttttctttgtatgaaattgaggccaggtatagtgactcacacctgtaatcccagcactttgggaggtcgaggtgggagggttgcttgagtccaggagtttgagactggcctgggcaacacagtgagactccgtctcttaaaagaagaaagaaaaaagaaattgaatatgtggtgattactacccgtttcatttacttttttacttattaacgtagtgactgtttaaaaaaagttacgcattgatcttcctgttccttccccaccaaaaataaaagcaaaaacaacaagccacccctcaaatgaaacaaaattaagcctgttctttatctatattactacttagcacatttgacctatttttttaaaacctctgttattttgaaagtaaattttggctctgttgaccttgcggttagaaaagttgttcttctgcttaaatgaaatgatcagttgtttgtagattaccaaatataaaagctcttcagaaccgctaatgataagttgctttggcttcatagaggaacgccatggtttgtggtggtaaattgttacagagcaaatgtcagtaccagaggcggtcatggatcaccacgtggaagcaggttgttcccacatgagattggtagcgagccggtgctgcatctgtctcctttcccactgcatcctgggtgcctggagcctcacagggttgacccgtgttgggggtggggatggttgtagaagcctctttatttttacttgtgatagattctggcactgattagaatgtttattcagtagtttttttcctatccgcctgagttttcatagctcagtataggataacatgggcttcggattttgtcaaccaatcaattatatagtagctcttttgttttgtttttaaaatttatttctatttatgtatttatttatttattttgagagaggcccttgctgtgttacccaggctggagtgcagtggcatgatcatagctcactgcaaccatgaacacctgggcccaagtgatcctcctgccttggccgtctgaagtgttaggattacagtgtgagccaccagacctgacctttgttttgttttagtagctacctcttgactagaaaaatagtttaatcttggcctccttaaaaccttttcattgatattttttactctgctagaacagttcagtttttgcatgtcttcaagtgaacatgctttagtattaattccatggaagccatttctgtagaataggctagtgtccagttttgtccagttttccttttggagcagtgtctcaggcacagaaatagtctgggcttggtggaccccaccccaaagtgtcacttcttttcctctggccttgctctccatgcccgcctttctcttctgatgttttaatgataccctccctgctcggtgatttgtgttcaggaagctaggcagtgattacttttgtttctgctttgtgaacttcctcccccacttcctatttttaccgcagttgcacaggaaatgaggcggctcctggctggctgctgctaagcagtgattttaggtggcagaggacaaggcctcagggcctgagccatttaaggcattttccaccttaatcttttcactaccttcttcctctaggagtcataggaacatgattttgtgattgggttgaggtgacatcatgtcctcagccttgtgggtggagacaggggttgctgtttagttggaggacagcacttttgtgaaggaagtgagggcttttttcagcagtaacaatgtgggtggaatgtcgtggccctgtggcctctgcagcttgagggaaggttaagttgaagggacaggccctgttgcaggtaaggatagggaggtggattctggttactctctagagggccttgactggcagcttgaagtgagctgaggagcctagtctgctctctcagatctttgaggggggcctcagcctctatggcaccctccttcctctgaacccatggcatttgttttctaaacgacttatttagcatttatcagtctcttttttgatgatgcctcttcttagcttatggacccgttatagcttaatttatggagaaagtttgtatcatctccccagaaagaagtaacttgttatacattagttaacttgaatatggaaggtgctcaaagcattagtttatcggagattcttaagagctgcactgttgacattttggggtagataattctttgtaggggctgtcttgtgcattatgggatgttcagcagcacttctggcctctacccactggatgctacccactagcacttgcccagggtgacaaccaaaacatctctagacattgccagatgttggtagggcagagaaggacacaaaattatacttttccccacttgttgagaaccactgtgttaaagaattgaattactaattactaacttataaaatggaataaagtagaatgtttggttccctgggattaaagccatttgttagtttctattttcatatctgacattctcataattcttagtttgctacttagagtatgctgtgctctatcagcttcagctagtgttcaggtataccttctgtgcactttcttttttttttttttttttttttagatgaagtctcactctgttgcccaggctagagtgctgtggcgtgatcttggctcactgcaacctctgtctcccgggttcaagcgattctcctgtctcagcctccctagtagctgggactacaggtgtgtgccaccacacccaactaactttttgtatttttagtagagacagggtttcaccatgttggccaggctggtctcgatctcctgacctcgtcatccacccgcctcggccttccagagtgctgggattacaggtgtgagccaccacgcccggccccttctgtgcactttcattgaaagaactaggagctgggcgcggtggctcatgtctgtagtaccagcattttgggagccgaggcagaaggattgcttgagcccaggagtttgagaccagcctgggcaatgtagagagaccccatctctacaaaaaatcaaaaaataaaaattagctgagctacttaggaggctgaggtgggaggttcacttgagggaggtcaaagctgcagtgagctatgatcgtgccactgtgctctagcctggggcatggagcaagtctcaaaaacaaaaacaaaaacaaaaacaaaaaaactagggcctgagcctttggcaggctggcttcttgtcctcatagaaggcattctgtcagcttctgtgccttgatattgcttgctctggaagtcaatttccttggaagctgagtagtgcaagggtaaggaggaaatgagaaacatttaggatataataataataggtaacatttatggagcagttgctgtagaagaggcactgtggtgaacaggattgacaggattgaaaggacaggctagacaacaggacggggaccatctggaataacaccttaagtttgggttaaaagttggttgtgcctttgaccaagcaaggcagtaaatatagcaggaggagtgggaaatagaaaggtgacagggtaaaactttttttgaaacatagtcttgctctgttgcccaggctggagtgcagtgatgcaatcttggctcactgcaacatctgcctcctgggttcaagtgattcccagatagctgggatcacaggcgcccaccaccatgcccggctaatttttgtatttttagtagagacagggttttgccatgttggtcaggctggtctcaaactcctgacctcaggtaatccacccaccttggcctcccaaagtgctgggattacaggcgtgagctaccgtgccctggccatgaaagggtaaaacttgaagaccctgcagagatgtctcctgggtctggtccttggagagggaggtcttgactggagagttgaatttgggaatcatcagcagtgatacggagtatgatctcctagagagaggtcacttttcattgctccagctcagcttctcatcagttccaagaagctggaagccttaaccatcttctaggagtggtaagcagagtgccatggtctggatatttgacagaggtgggatggtgcaagaatggagagctcaacctgtggcagcagattgccatgtcccagacctagctgtgtggtgaccactaccttagccatgtggtgagaacatgaagaactcacttcatcttattagatgcctcacctaccttatggggtcattgtgataaccttgtaatttgataacacggccaggtgtgatggcttacgcctgtaatcccagcactttgggaggccaaggaggttggatcacttgaggtcaggagttcgagaccagtctggctaacatggtgaaaactgtctcgactaaaaacacaaaaattagccaggtgtgtgacgcacacctgtactcccagctacttgggaggctgaggctggtcaatcacttgaacccaggagatggagattgcagtgagccgagattgtgccactgtactccagcctgggcttaacagagcaagatcctgtcttgaaaataaataaataaatatgataacatgtgaagtgcatagcacagtgcctggctcttacccacagttaatgtcagctgtttcaagatatttgatatctaaagctccaagtataatgcttggcacgtcatagacacttagtgactggtccatttctttggggagtacttatgtggacgtggcatgtcttcactagcttatttatttattttaagcagaaccttatttctagcatctaactactgcctccgtggttggcaagggtgacttcatgaatgttgtaaaggaataccattaaataagtactgaggacaaactaataattcaacaaatatttgttaaatgtttacatcatgcttagcacccttggatgttttgaatgagctcaggggtcctgggggttggaggtgacagggaaacacagagcaaaccggcagttgtgatctagcatgttatgcttcagtagagttaatgttaaggtggggctaaaaacagggtgttacggcagcagaggaacccctcgctcagtctgtcaaagtggtttctcagaagaagtgatgcctaagttagacatccaagaggaatgagagtgagccaagagagctttccagacagtagaaatgaaatgtgtggccaggtggcgagaaggaagatggcacatgtaggaagtgggtggtgttggggcggtgtaagaaaattgggaagggtaatggagagccatagtggattttaagcgcagagtggtgtgatcacattgattctagagtagtcacacagcatccagaggggagtagcccaggcatttggaagatcactcaggaggcgcctccataattcaggcaggaggtaaaaacagtagctttggtacggcagtgaagatagaaggaaaaggacttgagagatactaagaaggcaggaaggggccgggcatggtggctcatacctgtaatcccagcattttgggaggccgcggcgggtggatcacctgaggttgggagttcgagatcagcctgaccaatatggagaaaccccgtctgtactaaaaatacaaaattagccgggtgttgtggtgtatgcctgtaatcccagctactcaggaggctgaggcaggagaatcgcttgaacccaggaggcggaggttgcagtgagcttagatcgcaccattgcactccagtctgggcaactagagcgaaactccgtctcaagaaggcaggaaggataagactgtgattaattggatgtgaaggagagtgaagagtagaggataactcccaggtttctgccttgttcaagtaggcagatggtgatgtcatttgccaagactgggaaggcatattgaaagacttggaagatttggttttggacttttgattttgggacctgtccactaggcagttgaatatttgggttctggagcacaggacaaagatctgggctagagggatggatttgggaatcttcccagaaggaatatgttgctcttagaaacagagagggcatagcacttaaggtctatcagaggaggagtagctcaaaggggcaactaagaatggccagagaggtatgaggagagccagcactaagcgtcttttcgtgttagcagcttacagagttgcttcactttgtaatgtggtaacagatagagggagctaaaaaagtagagttctaaggaacgtccgagcaaagcactgaattttccaggcattttctcttgcctggatagatattttaaatttatgaatgttgagaataaaattcttcaaagcatttttctagagtgcatttctaaatacggtttgagtcagtctgaactgactaaaaacatggaaatggttgggctttgaacttcatagacaataacttcactaatctgcctaaagaatttcctgtagtgtctccacattatcaagggtagatatttggatttgcatttttgtggattggagaggacagaacattttctgtgtttttttttttttcctcagaagagggaattgtttaggaatgattcatctttatattttttgtaacagctttattgaaatataattcacataccatacagtttatccatttaaagtatataaattggtggtttttagtatgttcatagttatgcaaccatcatcaattttagaatattttcatcactctgcaaataaaccatatacccattagcagtcatcccttatttcccccattccacacccccacccccagccttaggcaaccattaattgactttttgtttcaatggatttacgtaattggtacagttcatattaagggaactttgggtctggtttctttcacttagcataatgttttcaaggttcatccatgtatcagtactttattccttttcatggctgaataatattccattgtacagttatactacattttgtttgtccatttgtcaattgatagacatttgagttgtttccagtttttggtattatgataatactgctccaaacgttcatctgcatgttggtttgtagacatgtttttcatttctcttggatatatatacctaggagtaaaatttcttggttgtgtggtaattttatgtttaaccatttgaggaactgccactgtgttttccaacatgtctgtaccattttgtattaccctgagcagtatatgaggattccaaattctctaacattttgtcaacacttgttattgtctgtttgattatagtaatcctagtggttgcgaagaggtatctcattgtgattttgatttgcatttccctgatagttagtgatgttgactgtcttttcatatgcttattggcatatcatctttggagggttcatctatatttgtgttttgtttgtttttttttctttagagatggagtcttgctctgtcttccagactggtgtgcagtggtgccatcttggctcactgcagcctatgtttcctaggttcaagcagttctcctgcctcagcttcctgagtagctgggattacaggtgtgcgccaccacgcccagctaattttttatttttggtagagatggggtttcgccatgttgaccaggctggtctcatgctcctgacctcaggtgatctgcctgcctcggcctcccaaagtgctgggattacaggggtgagcacctgtgcccagcccatccatatttgatcatcagttttggcaaggtaaattaagttgcaaaacctgaaactttaaaggaacaaacataacacatttgattgtagaaatgagggaaaaagagtgtgtgtgggtatgtgtgtttatgtacatatgtgtatatgtacagtggaagatgccataaacagatttgtaaaagttaaaggacaggctccccagagaaatagccagtgtgctccatccacatcaagcctgagtgtgagagagttctggataatcctgttacctggctgtgactttggaagtggagaccatgatctctgccttctccctcatatcatctgtcttaaggtcacagataccgcagccactgccaggtttccacaagccagtcacctttcaggtggagaagtagcttgctatagcagccagtttctcgagtttgcgcgacagtgccactggaacaatggctcattcatgtcagatttccagagagttgggcagcacacttgtgagaatccagctgtgaacaagccattgctgtctttaggagcttatgtgccaggtggtaaagtgtacatatgcaaataaaatggtaagatgattgcaagttgtcatgaagataagacagcattgtaggggtgaggtgaccctagattagacaggttggctgcagaaggcttctctgagggtgtaacacttgttttgagagctaaaggatgaacgggaggagcatcatgagtaggagggaggcaggagctttctggatagaggcagcagcgtgtgtaaagagcttggggcactagaagaactggaagataaatggtgtgactgcagaatgatgagtgagactcaggaggcacgacatgaggctggagaggtgggcagggctgtgcaggtctcagtaaggagtttgattttattcaaagtgccagggaccattggatataaattcttcataaactgcatgcagaagagagattaaaaggttggcagaaaggaataaaaatgaaactggaggaccaagctggtaaaaattgcccccaagggtctatcagaatcctaactcacttagaccaataagatcagtggttacttatgaacaatacgtttgaaaagacctatgaaaaaacacgtgaaatttggagtttctctgtctctcatgtttcctgtaagtaattcgctagatatagagactcgattagattttgattcagtattttaggcaaaaatattttttgggtggtactgtgtacttcctattttgtcacaatgataggcatataattatatgtttagttccccactttaatgatgctaaaattaattagtgagttcaggtgttatgcctgattccttcatcataaacttctccatcaagtttcaccaaatcattttaacagtgattaataatcattggctagatacactatttcattagagttgcaaaataatagttttcctagcatttcttctttatttattggctaattttctttgattaagcactttcctaaatggagtattcaaaaaaaaactatataaacaggaaaagcaggataaatgcttgatttcaccccccccccccacccccagcagttttcagaacaatagcttggtgccttaacacctccacagagagatgaccaatggaatttttcttaatatcattattgactcactttttttattgtggtagaatatgcataacacaaaatttacagttttaaccatttttattatacatttcagtggcataagtacattaacaatgttgtgcagccatcaccaccatccatctccagaactttttcaacatcccaaactgaaagtcttggccaggcatggtggctcatgcctgtaaacccagcactttgggaggctgaagcgggtggatcacctgaggtcagaagtttgagaccagcctggccaacatggtgaaaccctgtctctgctaaaaatacaaaaattagccagatgtggtggcataagcctgcagtcccagctacttgggaggctgaggcacgagaattgcttgaacccaggaggcagaggttacagtaaaccgaaattgtgccactagtactccagcctgggtgacagagcaagactccatctcaaaaaaaaaaaaaaaaaaaaaaagtcttgcctattaaacagtaactccccattttccccttctctcagctcctgggcacaacctctcttctactttttgtccctaaaaatttgactattttaggcaccccatatatatggaatcacacagtatttgtcctttagtgtctggcatcttagcagagtatctccaaggttcatccatgttggagcatgttattagaatttccttcattaattttttttttttattgacagggtctctgtcacccaggctggagtgcagtggtgcagtcaagcttactgcagcctcagatgcctgggttcaagtgatcctcatgcctcagcctcccaagtagctggaactacaagtgtgcaccataatgccaagctaatttttaaattttttgtagagacagggtctcgccatgttgcccaggctagtctcaaactggcctcaagcgatcttcctacctcagcctcccaaagtgctaggattacaggcatgagccactgcttccagcctttcttcctttttaatactaaataatagtccattgtatggatataccacatttgtttatctattcatcttccatggacatttgaattgtttccaccttttgactattatgaataatgcttcggtgaacatgggtgaagaaatacctgctcacgtccttgctttcagttcttttgggtagatgcacagaagtggatttcctgaatcacatggtaattctatgtttaattttttaaggaagcaccatactgttttccacagtggctgcactattttatattcccactagcaatacacaaggcttccaatttctccatgtccttgccagcactttttgttttgttttgtttttgagacagtgtctcgctctccgtcccaggctggagttcagtggcccattgcgatctcggctcactgcaacctgtgcttcccgggctcaggtgatcctcccacctcagcctcccaagtagctgggaccacgcctggctatttttttttttatttttagtagagacgaggtttctccatgttgcccaggctggcagtggccagcacttattttctgtgttttgtttattttaatattagccatcctaatagggtatgaagtggtatctcactgtggttttgatttgcattttccaagttatattattccctagttgtactgtctgttcttgccttactgtaaagaaatacttgagactgggtaatttataaacaaaagtggtttaattggccgggcgcggtggctcacgcctgtaatcccagcactttgggaggccgaggcgggcggatcacgaggtcaggagattgagaccatcccggctaaaacggtgaaaccccgtctctactaaaaatacaaaaaattagccgggcgtagtggcgggcgcctgtagtcccagctacttgggaggctgaggcaggagaatggcgtgaacccgggaggcggagcttgcagtgagccgagatcccgccactgcactccagcctgggcgacagagcgagactccgtctcaaaaaaaaaaaaaaaaaaaaaaagtggtttaattggctgtacaggaagtatggcagcatctgctcctggggaggccttagggagcttttattggtggcagaaggcaaagcggagcaggcatcttaaatggcaggagccaggaccgagagagagaagggaggtgctgcccacttttaaacaaccaggtctcatgagaacccactcactattgagtacaaaggggaaaatccaccacatgatccagtcacctcctcccaggctccacctccaacattgggaattactattcaacatgagatttgtgtggggacacagatttaagctatatcactagtgattagtgatgttgagcatcttttcatgtgcttattagctgttcgcatatttcttggggcaaaagtctattcaagtcctttgcccatttaaaaattggatttttgtgtttgagttgtaggagttctttatatattctggatattaattccttttcccatatgtgatttataaatattttcatctatggattgctttttgcttgtaatgtcctttgatgcctaaaagttttgattttgaagtccagtttatctgttttttgttgcctgtgcttttcgtgtcctatccaagaaattattgctaagtctgaactcagtaatttttatatatttaatgattttcacccctaaatggttattctttttgatgcttaagttgtcccattattgatcgttaatggcacttatttttcgggttttctaggtgcttttgacatgagcctagtagtgttatatgagttccctgctttctggctttacaagaagtccggggcttatcggaaaaatttctgatcccagatccagaatcagccatttctttaactagttctgattctttttggtgggaaatggtattaagggcattcattacaattaagatgtaaattccagtaggtttttttttttttttagtagaactaggaaatacatactttttggaaagaaaaagatacaccatgatttcagactgatttacttccaattcaaatgaaggattaaaggatttttatatctttgattttatatttgtcttttctcatttgttgacagtaacaccagaggggtccagtcaaaacacgattttattgattgaccgattgatggagaccacctcactctgtcgcccaggctggagtatagtggcgccatgttggctcactgcagcctccaccacctgggctcaagtgatccttccacctcagcctcatcagtagctgggactacagggatgcactaccatgtctggataattttgtttgtttgtttgttttgagatggagtctcactctgtcacccaggctggagtgcagtggtgtgatctcagctcactgcaacctctgcctcccgggttcaagtgattttcctgcctcagcctccctggtagctgggactacagacgcctgccactatgcctggctaatttttgtatttttagtagagacgtggtttcaccatattggccaggctggtctcaaacccctgaccttgtgatctgcctgcctctgcctcccaaagtgctaggattacagtcatgagccactgcacctggccaattttgtttgtgtgttatagagatggggtctcactgtgttgcccaggctggtcttgaactctaaagcattcctcctgctttggcctcccaaagtgatgggattacagatgtgaagcactacacctggccgaaacacaattttaaacttgaaataattcttctctgtgtggctgtgccactaatttggtaaataatatagattcatttgtcttttgtttcatttttagggatatttttcttttttatatttgctttttgcttatatatttacgtagttctaaagataaaaccataagtaagatagattgaaagaagtctggctttcctccttgtctttgttcttctctatacgttgtaggtaaacatctttgttggtttttggtttattctcccatggcttattttaaaagctacaagcgtgtgtgtctgtgtgtttctgtattccctataccttacttcattcccattttatttcttctcgtttttatcttggcaatcatatttcttatttccaagaattcattgttgatttctacttcctttatgatttgtttgcttttggtttttttttctccccccgagatggagtcttgctctgttgcctagagctggaatgcaatagtgcgatctcggctcactgcaacctccgcctcctgggttcaagcaattctcctgccttggcctcctgagtagctgggattacaggcgcacgccaccacaccaggctaatttttgtatttttagtagagacggggtttcaccatgctggccaggctggtcttgaactcctgaccttgtgatctgcctgccttggcctcccaaagtgctcggattacaggcgtgagccaccgtgcccagccctgcttttaaggatgcactatctttccaacactgtctgaggaataccagtcagaatttcttttcaggtgttttttctgggacctaaaatatgtatttcttctgaggtctgatcaccttttcatcttagttgtccttttttgtccttttggttttccttcactgtctggtgatccttatcaatgaagaactgggttgttcatataggtaatttgcaggaggtccctctgtttttcaatagtcctcttgccttagtgagagttggctgattgaggaatgggaagtacagatgaaatcaggttgattaactggtttcccactcctgatttctctacctgctgattcaaagctgggcatttatccagctcctccaggaaaaagggctctgcctctctgttctcttttggccctgcatgttgtaaaaagtggccagctttgctctggtctgtcttgtaatatagtttcctctgctttctctccatcctctagaagatggcctgcagttaaatagactgtggccctcagaccttctcattactgttttgctgagattcccttgtgaatgtctttattgttatgtcactgggatttggggaggatggagaggtaagtgcacttgcctgtttagcctgtcgttttgaaatgaaactccttttgtcatcccatttctgacagtaggactgcttgccactctcttttctctgttggtttaaggactgaagtggatctaaaattattctctgtattcacaaatcatagctatcaatctttagtcagatgggaaaacttaattaattaattcagggactaaatttctctttatagctgcatagtccatgtaagtagaagttagttatcaatgaagtgtgtgatgcttcctgccctgcgattggtagatttctatttggttcaaggattgggtaacttttcaagacctttcctgtttgtcagtgacttttttccagagaagcagaaataacaaggcctgcttcctttgcttgctttgtgggaatgataatatcatcatcatcaaacatttagtgcttaatatgtgccagacatcattctaagtgctttatatgtataaacccatttaactcaataacagtggttactattatccttattttatagatgatgagacaggcagagagaggttaaggaacttgctcaaggtcaagctgatcctgacagccaagatctcaccctattagtcagacgcccagggccattctcttcttcacttcaatcgtcttatctttctaaagggaagtgcttcaagagattttcttaggatggctgaccacttttcatgtcttgtcaaccataggtataagaaaatcctctaatactgagtcttcatctagtttctttctttctttctttttttttttttttttttgagacggagtctcactctgtcacccaggctggagtgcagtggcatgatctcggctcactgcaagctccgcctcccaggttcatgccattctcctgcctcagcctcccaagtagctgggactacaggcgcccgccaccatacctggctaactttttgtattttagtagagacggggtttcaccgtgttagccaggatggtctggatctcctgacctcgtgatccgcccgcctcagcctcccaaagtgctggaagtgctgggattacaggcccggctttctttttttttttttttttttttttgagacagtctcactcagtcacccaggctagagtgcggtggtgcaatctcggcttactgcaacctccacctcccaagcgattctcctgcctcagcctcccaagtagctgaaattaccggcatgtgctaccacgctcggctaatttttgtatttttagtagagacagggtttcactgtgttggccagactggtctcaaactcctggcctcaagtgatctgcccgtctcagcctcccaaagtactgggattacaggcatgagccaccatgtctggccttcgtgtagtttcaagcatgtcctttattgcctgaaatagaaatcgctgatgactctaattgtagaaatgaatattttaaatgatataattatggctgaattcagttttaatctgtggagaacttttgcaaattatgttgaaaagatgttacttaaaatgttcttttctgctatgtatttgattttttaagtagcattaaaacttaagagtacatgacaaatctcacaagtcttggctacactaacttctgaggtctttcacaatgcgtatttatttccatgcagcatgaatagtggattcataaatggtgaatgttttcccagtgaaaattctttttaagaaaatacggaaaagaaatgtccttaaatggtttgaacatattttagcctgacaggcagataaatatgagggtggagaagcatgtgaaaaacatttagacagcattaagaagaattttattaaaataatgataataataataattagctgggcacggtggcatatgcctgtagtcccagctactggggaggctgcagtaggaggatcatctgagcccaggaggcagaggttacagtgagccgagatcacgccactgcactccagcctgggtgacagagccagacccagtctcaataaataaataaaaacagaaataaaataataaaatccaggtgttcgtgtgtgtgtgtgtgtctgtgtgtgcattttcaacattttgtttcagaaatgttcaatcatatacaacattggagcaagtgatatgatgcacctcatgtacccatcacctaacttccaacagtattttgtcaggggatattatgatcactgccatgaagacaaatgcttaggtaggtattaccaccttctctgtacattgtttcttggcaaaatgtcatttgaaaatgatagaactcgggcaggcatgatggctcatggctgtaatcccaacactttgggaggctgaggcaggcggatcactttgaggtcaggagtttgagaccagcctggccaacgtggtgacaccctgtctctactaagaatacaaaaattaatcaggcgtggtatcgggcacctgtaatgccagctactcaggaggctgaggcatgagaattgcctgaacccaggaggtagaggttgcagtgagccgagatcgcaccactgcactccagcctgggcaacagagtgagacttcatctcaaaaaaagaaaaaagaaaatgatagatcttgaatgtatttcagttccatgaccttttttttttgtttgtttcatcgtgttagctaggatggtctcgatctcttgacctcgtgatccagctgcctcggcctcccaaagtgctgggattataggcgtgagccactgtgaccagccagttccatgacattttaaaaaaattcaacactatctagttttgattacaacaaagatctgcacaggaacaccagatctgttaagaattagcgaaaactagtttacatgttttgaatgttttttctctctgcttgggtaggaaccccaggcgtgactgtgatacttgagcagtcttgttagaagcaattatgttacaaacagaacttttcattgatctgtgtaaccagccccttggttctcagaaaaagagttgtggccaggcacagtggcacacgcctgtaatcccagcactctggaaagccgagacaggtggattgcttgagcttaacagccagagactggtgaaaccctgtttcaaaacaaacaaacaaacaaaacaaaacaaaaaaacttatttatcactttggaagggaggtgcctttctgtattattattattttttgagacggagtctcgctctgttgcccaggctggagtgcagtggcatgatttcggctcactgcaagctctgcctcccgggttcatgccattctcctgcctcagtctcccgagtagctgggactacaggtgcatcccaccacacctggctaattttttgtatttttagtagagacagggtttcaccgtgttagccaggatggtctcgatctcctgacctcttgatctgtccactttggcctcccaaagtgctgggattacaggtgtgagccaccgtgcccagccaacctttctgtattctttttttttttttttgagacggagtctggctctgtcgcccaggctggagtgcagtggcaccgggatcacgccattctcctgcctcagccttcccagtagctgggactacaggcgcccgctaccacgccgggctaatgttctgtatttttagtagggatggggtttcatcgtgttagccaggatggtctcgatctcctgacctcgtgatccgcccgcctcggcctcccaaagtgctgggattacaggcgtgagccaccatgtccggcctttgtgtattcttgaatacacaggaatattggtgagaatccctgagttgcactacagtcggcatcatcaggcgtcctcattcttgtggctgtcagcagattttcagtggacccccagtttggctctcaaattatagcatacatcagaatcatctggggaacttgttaaaaaagtgtattctccaaaaaattagtcgggcatggtggcgggcgcctgtagtcccagctactcaggaggctgaggcaggagaatggcgtgaacccagggggcggagcttgcagtgagccgagattgcgccactgcactccagcctgggagacagagcaagactgtctcaaaaaaaaaaaaaaaaaaagtgtattctctgcttctctcccaaagattgattcgttagatttggattgcatcccagtaatcagtatttaaatagtcattccaggaagggtgctatcctgattctagtatcagagaaggaagtccttaaaagccattgttggttttcactggctgctactaggtttttttgttgttgtttgtttagagacaagatctcactattttgcccagactggactcgaagtcctggactcaagtgaccctcctgctttggcctcccaaagtgctgggactgcagatgggcaccactgtgtccagccctcatcctagttttactaaggttggtaggtggtgaaaaaaattgctaaaaatgttttcatcctttaacatgctcagtgagtgttatgacaaccccacatagacttttactgcctacagacagatttactgtcacagaggttgtcttagttcaggctgctttgacaaagtactatagactgggtagcttataaacaacagaagcttatttctcacagttccaaagtctggaggtttaagatcagggtgccagcactgtcaggttctcatgagaaccctctttcgggatgcagactgctgacttaccatgttctcatatggcagaaagagagtgaactggcctctttttataagggcactaatctcatttatgatggctgcaccctcatgacctaaataccttccaaaggccctacctccagataccatcacaatgggaattagatttcaacatatgcatttttggggaaacattcagtccgtaacacaggtgcacccttagttgtgggcaattcagttctgatgctgtggtctgatgaccacaccctgacaacataggtgcatagtgggtagtatgattgcaaaggatctcgtgtttttctctgtggttccactaaattctttagtccaagccttaggcctcccctgcttggtcacctgttggaccaacactaggtacaggaagtgcaggaagctcagtttacaaaaagtcatctggtgcttccagctgtatgtagcttcctctgaaagaaaaggaagcgtggggagtgtagaaagcagttagttcttcacctgaggctgcagttccaaaactgaatggaaactgtggtgtttgggaagtgtgtttgactaaagtttcctttcctcaatttctcaaaggaaactgtgactcttcccccaccatcttccaccccttcagtttccatacatacaagaaagaatgatgtcctggagcaacctctggagaacaactgtggggcctccccattacaaaacagcctcccctgtgtgcaatcagaattgctttcgtctgggcagaaccatacaacacacagctgggctgtgtggagagctgtggccgactgtagggcttgcccgctagtctgtattttcccctacatttctctacctctcatatagtggaattggtaccacgcaaccacctctggcctttgatggtggcctttgacatgcaaccacctcaaagccaaagggctttgaagggaggtgatgtgtgtcactttcagtgggaagtattaaagagtgggtatgagttttgactttctttttctgtgctagggcaaccatgggagacataagttctagtagtgtccctgtaagctgaagaagggctgctagacccacagtgaatttttgtgaacaagaagtaatctgggctgggcgccttggctcatgcctgtaatcccagcactttgggaggccgaggcagtcggatcagttgaggccaggagttcgagaccagcctagccaacatggtgaaaccctgtttctaccaaaaatacaaaaattggctgggcatggtggtgtgtgcctgtgatctcccagctactcaggaggctgaggtaggagaattgcttgaacccaggaggtgaaggttgcagtgagccaagattgcaccactgcactccagcctgggcaacagagcaagactccgtctcaaaaacaaaaagtaaatctggttgggcatggcggctcacgcctataatcccagcactttgggaggctgaggcaggaatcagttgaggtcaggagtttgagaccagcctgcgcaacatggtgaaaccctatctctaccaaaaatacaaaaattagctgggcttggtgatgcatgcctgtagttccagctactgtggaggctgaggcaagagaatcacttgagctcaggagctcaagaccaggtaggttgcagtgagccaggatctcacctctgcactccagcctgagtgacagagcaagattccatctccaaggccaggcatggtggctcatgcctgtaatcccagcactttgggaggccgaggtgggcggatcacaaggtcagaagatcgagaccatctggccaacatggtgaaatcccgtctccactaaatatacaaaaattagctgggtgtggtggcgcgtgtctgttatcccagctactcaggaggctgaggcaggagaatcgcttgaacccaggaggcagaggttgcagtgcgccaagatcatgccactgcactccagcctggtgacagagctagactctgtctcaaaaaaaaaaataaaaaaaagtaaatattaggttaagccatttatttcaggatttgttactgcagcatagcttgatctgtctgccagtttgaagttctgagagtcaagatacctgagtttgattctgagactacatgtggtctagtgcaagacctttaatgtcctgaatcccctttttaatatataaattgaagggtttaagttagatgatcatgaagggcctttttggcacttaacattcacagatgctggatggcagcactcaaatgcagatgttccttgacttatgatgggagtttatgtcctgataaacctctcataagttgaaaatatcctaagttgaaaatgtaaggaccgggcgcagtggctgatgcctgtaattccagcactttgggaggctgaggcaggaggatcgcttgagctcaggagctcaagaccagcctggggaacatggtgaaacccagctctataaaaaatacaaaaattaactgggcgtggtgctgtatgcctgtagccccagctactcaggaggctgaggtgggaggatggcttgagcccaggaggcggagcttgcagtgaaccaagattgcaccactgtactccagcctgggtgacagagccagaccctgtctcaaaaaaaaaagaagaaaagaaaatgcatttaatattcctaatgtaccaaacgtcatagcttagccttgcctacctgaaatgtgctaagaggacttcactttagcctgcagtttggcaaaatcatctaccacaaagcctttttttctctctctctctcttagagacagggttttactctgttacccaggctggagtacaagggcacaattacagatcactgtaacctcaaactcctgggttcaaatgatgctcccacctcagtctctgaaatagctgggactataggtgacctggctaatttgaaaaatttttttgtagaggtggggtctttctgtgttgcccgggctggtcttgaactcctggcctcaaatgatctttccagcttggcctcccaaagcgttgagattactgttgtaagccaccatgcccagctacaaagtctattttgtgataaagttataaagaaatttggatcaaaactcaaaacttgaagtatagtttctactgaaagcatattgcttttttttttttttttttttttttttttttttttttttttttttttttttgagacagagtctcactctgtcacccaggctggagtgtagtggtgtgatcttggttcactgcaacctccgcctcccaggttcaagcgattatcctgccttagcctcccaggtagctgggattacaggtgcctgccacaatgcccgactaatttttgtattttttagtagatacgagctttcaccatgttggccaggctggtctcaaactcctgacctcaggtgatccacccacctcagcctcccaaagtgctgggatcacaggtgtgagccaccgcgcccagccgcatattgcttttttaccattgtaaagtagcaaaactgtaagtcaagccattgtaagtcaggaaccacgtgcacacttttctgattgatgtacaaaaaggagactaagtctggcactaaagtcatccctggaaaacttatttattattattagtttttgctattaaatgagaagttagttatgtgaagaaagtgacaaagatgaagtaatacttttttaaaaattagttttattgagatataattcacataattagtttatttggctcatggttctgggaagtccaaggtcatggcattggcatctggtgagggccttcttactgcatcaccccaaggcgaaaggtggaaggacaggagagctcaagagagcaagagatggttgaacttctgtaacagattcactctcacaataaattaaaccactcctgtgataatgccattaatctattcaggaggacaagagccttcatgacctaatcatctcttacaggtctcacgtctatacactattgcactggggattaagtttccaatacaagaactttggatgacatttcaagccatagcaaccactatttaacttcagaacattttcatcactccccagaaaagctgtacacattagcaaggactcctcattccataaatctacttttttttttttttttgagacagagtctcactctctcgcccaggctggagtacagtggcaccatcttggctcactgcacccttcacctccaggttcaagtgattcttctgcctcagcctcctaaatagctgggattacaggcatgtgccaccatacctggctaattttttttgtatttttagtagagacggggttttaccatgttggccaggctggtctcaaatgcctggcctcaagtgatctgccccccttggcctcccaaagtgttgggattacaggcgtgagccaccgcacccgcccagatctacttttttatctgtgtagattgcctattctagacatttcatatcagtagactcatacaataggagtctccttgtctggcttctttcacttagcacagtgtttttaaggttcgtccatattgtagcatttatcagaacctcattcctttttatagttgaataaataatccattatatgtctgtactacatttgtttattcatttgtcagttgataagcaattgggtcgttactacttttgactattatgaataatgctgctatgaacatttgtgtgcaggtttttgtttggacatatttcttcgtttctcttgggtatatacataggaatgaaattgctgggttatgtggtaacactatatttagcattttgaggacctgccaaactgttccatagtagctatcccattttactttattttttttttgagacagcgtctcactctgttacccaggctggagcacagtggcacgatttcggctcattgcaacctctgcctcctggttcaaccaattctcctgcctcagcctcctgaatagttgggattacaggcatgtgccaccacacccagctaaattttttttttttttttgagtctcgctccatcacccagggtggaatgcagtggcgtgatctcggctcactgcaaggctccgccttccgggttcatgccattctcctgcctcagcctcccaagtcacccagctaatttttgtattttttagtagaaacagggttttgccatgttgccaggctggtttctgacccctgacctcaaatgatcctcccgcctctgcctcccaaagtgctgggattacagtcatgagctactgaattcggcccattttacaatcctatatgcaatgtatgagtgttttgatgtttccacatcttcatcaatacttgttactgtctttcttactgaagtaatcagttttgataaagcagccatatggcaaactaaacagtgaagagatttttacatgcatattagcttaagttgctctctaaacagttgtagtgtgtattggcgtatttataaaaatttgcactgtgagcttagcactaaagtaaatgttaatgactaataacataattcttcaacttgtttagcttttggaaaatttttcatttcaaaaatgaagcactcttgaagggaaaaaaaggagtaaataaaaaatgagttgtttgatcctctctctcttgattcaccagatgtaattgttctcttggagcatttttttttttttaaagacagattctctgttttccaggctggagtgcagtggtgtgatcatggttcactgcagcctcaacttttcaggctcaagtgatcctcccaccttagcctcccgagtagctgggaccacaggtgcacaccatcatgcccggttaatttttgtatgtttttgtagagacagggtttcgccatgttgcccaggctggttgaacttctgggctcaagtgatctgcctgctttggcctcccaaagtgctaggattacaggtatgagccactttgcccaacctcttgaagcataaacatataaacacacacacacacacacacacacacacatatttcttttttttttttttttttttttttttgagacggagccttactctgtcacccaggctggagtgcagtggtgcgatctcagctcactgcaacctccgcctctcaggttggagtgattctcctgcctcagcctcccgagtagctgggattataggcacgcgtcactacacctggcttatttttgtattttttagtagaaatggggtttccttctgttggccaggctggtctctaactcctgacctctcaggtgatccatctgcctcagcctcccaaagtgctgggattacaggtgtcagccactgtgcccggttgcataaacttatttttataaattatgtgcttctaaattatcaggtggactgtgccttacatgtataggcttgagtaggctgagcatggtggctcacacctataatcccaacacttttagaggccaaggtaggaagatggcttggggtcacgagttcaaggccagcgtggacaacatagtgagaccctgtctctacaaaaaaaaaaaaagaaaattaggtgggcatggtggtgcatgcctgaggtcctggcccctgaggaggctgaggtggaggattgcttgagcccagaaggtcaaggctgcaatgagccatgattgtatgactatactccagtttgggtgacagagagagaccccatctctaaaagcaaaaaaaaaaagtgaaataaaataaaaaatcgttgctatcttttattaatattctgttttgggagacattattcttatattttcctcacactttttaaatgtggtttcttttagttctttgaacatacttaaattgacttaaactcttgtctgttaagtccaatatctgggcttcccttgggaagagttttctattgttgttttttccctttatatgggctatattcttttgtttctttgcatatcttccaattttttgttgaaaactggacattttattttattattattttcagacagagtctctctctgtcgcccaggctggagtacagtggtgtgatccaagcaattctcatgcctcaactgcctgagtagctgggactatgggtgggcagcaacacacctggctaattttttttgtattcttagtagagacagggtttcaccatgttggccaagctggccttgaacccctgacctcaggtgatttgcccacctcggcctcccaaagcactgggattacaggcttgagccactgtggccagccaactggacatttttaatgacataatgtggcaactctgaaaatcagattctcctccctctccagatgagctctaagtcaggtaaaatacagagatatttgcaaatggggtattttggggaaccaccagacaggttaaataatgccaatttcctgggaatggtactttgaaggagctgtagcccagttctgcttcctctggtaactgccagtcttctggtcttcaatgtggatgcagctggtagttttcaaggctattatggagctggagagctaggaatgggactcagtcaagttaaaatgctacaaaactcactgttcttaccaggattcagctatttatctttgataaattatccccagtttgctaaaagcctatttccagagttctgaaaaaggtgattctattattttgccaatttttcattgtttttatgtagtagagaattttggtcagggaaagtccttattctgccatttttgatgatactctttccctcccctttttaggcttttattttcatgaatcttgtatctcttggtgttttgttttgttttgttttgttttgttttcgagacagggtcttgttttgtcacccaggctagagtgcagtggtgtaatcatggcccactgcagcttaaaactcctgggctcaagtgatactgctccctcagcctcccaagtagcagagactacaggtgcacaccaccatgaccagctaattttttaaattttttgtagagatggggtcttgctctgttgttcagactagtctcaaattcctggcctcaagcgatcctcttgtctcagcctttcaaagtgctgggattacaggcttgagccactacacccagcctaatttttgtatatgatgtgaggtcggggtccagattcattttttcatgtggatatttagttgtcccatcaccatttattgaagagactgttctttccccactggatgtttttggcatcctggtctaaaatcagttgactgtagatgtatgggtttatttctggacttctaattctactccattgatttatacatctttccttatgccagtatttcactgctttggttactatagctttatagtagattttgaaatcaggaaatattacttttacaacattttttctttcagtatttgttttagtcatcctggatccctcgctttttttttttcttgcgtcagtttgtttgtacaaatagcacaggaggatccccgccccatgcagacggcagcccgagggggtcgcagcagtccttctgttctcacatttgtagacagagatatctactctgaagcctttgtaggggcctgggcacctttgggagcttgagctggaactgaagctggagctgcagtctgggcgctgatttgatccttggccttggcctttagccggcacagcctgagtcccttggcagtgcgggcacgagcacacttcccaagcttggggtgggcaatgtaggcaagtcgatcgagcttgtggctgacaccctttgggatcttgggcttaacctccttgggctttacgagggccttgatagcctcggcacgtgcactcatggccttggcattgttggcctgcatcttcttgaggcccttcttgtgcttcttggcaaagtgcatgttcctcaggaacctggggtccatccacttaagagatttgtatctttgtgatcggggtttcttgatagcatttctgtgccattttcgggactggttgtgtgtggtatggttcttggacttggccctgtctgtaccttaagccgcagctcccgaagcacctagaactggaaccctcacatttttatatgattttagggctttgttttatttttggggacagagtcttgcagtgttgcccaggctgctcttagactcctgggctcaagtgatgttctcaccttggccacctctaagtacctaggacagcaggcatgcactaccactcctggcttccaaatgaattttggggtcagcttgcccatttctgtagaaaaggtaattgaaattttgaggccggcatggtggctcacgcctgtaattccagcactttgggaggccgaggtgggtggatcacttgaggccaggagtttgagaccggcctggccaatatggcgaaacctcatctctactaaaaatacaaaaaattagccaggcactgtgacgcgcacctgtaatcccagctacttgggaggctgaggcaggagaatcacttgaactctggaggtggaggttgcagtgagctgagattgtgccactgcactccagactgggcgacagagcacaactctgtctcaaaaaaaaaaatattttgataaaaattgtgttgaatctgtagatgaatttggtgaaatagtataactttaagcattataagtttcatttagagaaagtttggaagtatgtaaagtgaaaaagagtttaatgtttgtggttttttaattaggtaagcatataggtctcacttggtcttccagatctgtcaaaggaatgggggcaggctctcctagagccagaggcagccgcggtagaggaactaggaagctggtgcaccactgaacaaagatagagtgtttctcagggctgcataagacactcactgtggccaactcaggtgaaggttttccttcagaggccacagagtctccacgggaacagcctgccccgcttcagcattcctgtagagtgcttctgttgtatatcagaatctataaattgtggagcactcgggtggggatagatgtgattgccttatttgtcatgaatttgaaaaaagaaaacattttggaacacattttttacaagtagccatttgatatttgtttcttgaaaagtttatgagattttttttaaagagctcaaattttgttgaacatagagccataaataatggttgttttattgactttatatgttatgtgtttgtatccacagtgtccttctcatctcttgcctttgtaacctacctaattcctgtgttgccaacacaatcatagaaatacaaaggaattatggtaattggccataagtgacgaagtatgagttacatttaattatatattcaaaaaaggaaaatagaaaacctggttatcaataagtagacgaaactatataccaccattacataggttgcagttgaatatgtggtcaagcacggtggctcatgcctgtaatctcagcattttgggctgaggcgggaggatcacttgagctcaggagtttgagaccagcctgggcaacatggcgaaacctcgtctctacaaaaaatacaaaaattaaccaagcatggtggtacatctgtagtcccagctgctccggagactgaggcaggaggattgcttgggcctaggagttcgaggctgtagtaagccaaggtcatgccactgcactctagcctgggtaacacagtgagactctgtctcaaaaaaaaaaaaaagttggccaggcgcagtggctcaggcctgtaatcccagcactttgggaggccgagacgggtggatcacctgaggtcaggagttcgagaccagcctggccagcatggtgaaaccccatctctactaaaagtacaaaaattagccaggcatggtgggcgcttgtaatcccagctactcaggaggctgaggcaggagaatcactggaacctgggaggcggaggttgtggtgagctgagaccacgccactgcactccagcctgggcaacagcaagactccatctcaaaaaaaataataataataagttaaatatgtggtaaatgtgactttcagtgaaacgtatttgaacttttgtttgggagagcagatggtttcaagcaaatgttattcctgattttagctttatgagaagagtcacagtattccgctgttgtaggtatcagaaactacaaccagcgatatccagattctgctatttgaacctatccagagtcaggggttctaagaagccacccaaggtgtgaaactggtataccttgccaggctcccgctctgcacacccagagggaaactggtaccggagtgaggattggaagaatcgtgtctgtaaaccgcctgccagccactcccttctccaggctctgtttctgcaccctgcacttaagcccagcttggtatccgactgtcccgtcctactttgggacctttgccgtggtggtcctttaccttgtgagtcccacctgtcccttttgcacttgtccaaacctatcctacaatcaaggcctacctcagaagaatatttttttcgtaacaacctttttgatttcccttgccctttgcccatctctgcctttgctgatgccccataaagtttatgagtgctgtgtgtgtcaacagccctcaccataatctgagtactcatgtgatcctcctgaagcttgtgagctcttcaaagaggaaaggagaaaatgctgaacgtggatccaggccctgttcaacgtgccagcctcagctttgaaggggccagtctagaatcatacttttttggttgcattgtttttgtattactacttgaggaattttctaacagtcatcatttcatagttcagtgctcactattgtacctgctcctctaaggttataatatgatttcttattcatttgtagcccacctgtgtggataatagcatcacaggagttattgtccagaattactgtagccttcctcactttatcttatttttccccccgacaggaaaggacttagaagccttacaaatacatctgtgcattcttgcttcagactttacaactgagggccagcccagtctggaagcatctcttattaatgttacaaggaaaccgctacctcagcaaacaaaaggaatggaggaggagacttacaacaaacgccatttaaaaaaaaaagaaaaacttgttttcaggaaacattagaggaaatttggagaatttcagcattgcatagaagcagccttacaggtaaacggatttgacgggcaggctctgtcaaaattctgcagaagtttgatcttccttcttaaggactttgtgtgaagtaattctttactgcttttaaattgctgttgatcagcttctgggtttttgggttctaacttttttgggtatattgaagacacagtgtattacattatattacatttttaaacgttaagttatttttctgccattgtaaatacaagtatcaaaatattcttgcaaagaagtaaacatttttctcagcaagcatatccttttagtaagagagtggaatgctaaacagttcttatccagcattttggacatcttttattttttgtcagagatcctgtctacactgaaaatattaattatataaacctgttgtctctcacctctacattggatcacatggtcacctgcctcatggaaatgccttttttaaaacttcgatttgcagaactccactatttttatacctagctacagttttgagaaagaagaatcagaaccctgacccacttacggttgctgggacaattccccctcccgcatgtattgctgcagtgcccaggacagtaaaatggactacaagcggcgcttcctgcttggcgggtccaagcagaaggtgcagcagcaccagcaatacccgatgcctgagctgggccgagcactgagtgctcccctggcatccacggccaccactgcccccctgggcagtctgaccgctgcaggcagctgccaccatgccatgccccacactactcctatcgccgacatccagcagggcatctccaagtatctggatgccctgaacgtcttctgccgtgccagtactttcctcacagatctcttcagcactgtgttcaggaactctcactactcaaaggcagccacacagctcaaagatgtgcaggagcatgtcatggaagcagccagtcggctgacctcggccataaagcctgagatcgccaagatgctaatggaacttagtgctggggctgcaaattttacggatcagaaggaattcagtctccaggacattgaggtagagtatcttttgtgtcatacttgtgtaggaaaatatactacaaaggtaagtgagaatattgtcttaagtttttttccaaatcactgtaatagtagcctttgtcctcttgctgttggtactctgtctttgtaaaaaatgtgtgcgtgccaggttctgaattgctttcatatcaaattcagtaggttaagggtaggtgtggtggctgtaaccccagcactttgggaggccaaggcgggaagatcgcttgagctcaggagtttgaggcatcatagtgagaccttgtctctacaaaaactaaaaaaattaattagctgggtgtggtggtgtgcacctgttggatagattttaaaaattacttttagctgttcagagagttaatctggcattagtttttccatccttctacatccagaagccctgactactccagaagcccagaagctgaggtgggaggattgcttgagcccaggagtttgaggctgcagtgagccgtgattgcactgctgtactccagcctggacggcagagtgagaccatgtctcaaaaaaaaaaaaaaaaaaaaaaaaagaaaaattattaaacaaaccagccaatattttatattgttgtctttcaaattttcaagtcagaacctaattttcaaataccgtactggtaaaagttattagtgagtactgagaattctaaatacgattatgagctttatttgtggattttttttttttttttgagacggagtcctgctccgtcgcccaggctggagtgcggtggcacgatctcggctcactgcaaggtccgcctcctgggttcatgccattctcctgcctcagcctccctagtagctgggactacaggcacccgccacctcacccggctaattttttcgtatttttagtagagatggggtttcaccatgttagccaggatggtctcgatctcctgaccttgtgatctgcccgccttggtctcccaaagtgttgggattacaggtgtgagccactgcgcccagcctttttttttttttttttttttttttttaagtcagtttcgctcttgttgcccaggctggagtgcaatagtgcaatcttggctcactgcaacctccacctcccgagttcaagtgattcttctgcctcagcctcctgagtagctgggattacaggcatgcgccaccatgcccggctaattttgtatttttagtagagacggggtttcaccatgttggtcagactagggtctcaaactcgcaacttcaggtgatccgcccgcctcagcctcccaaagtgctgggattacaggcaggagccaccgcgcccagccgttttttttttttttttttttgagacggagtctcactctgtcacacaagctggagtgtagtggcacgatctcagcttactgcaacatcgcctcccaggttcaagcaattctctgcctcagcctcccgagtagctgggattacaggcgcccaccaccacacccggctaactttttgtatttttagtagagacagggtttcaccatcttggccaggccggtctcgaactcctaacctcaagtgatccacctgcctcagcgtcccaaagtgttgggattacaggtgtgagccaccctgcctgtcctgtggatttttattatattgaatctttggtttttagagagtcccacacgtttatagaataatttttccaattctaaattcacagttgctaatattcagatgtatttgagtcttcttcagtacatttcttggggtctttgatagttttttttttttttttttttttttaaaagacagagtctctctctgtcgcccaagctgaagtgcagtggcactatctcggctcactgcaacctctgcctcctgggttctagcagttctcctgcctcagcctcctgagtagctgggactacaggctcacgcagccatacccagctaattttttgtattttagtagagatgggttttcaccgtgttgcccaggctggtgtcaaactcctgagcttaggcaatccacccacctcatccttccaaagtgctaggattacaggtgtgagccaccacacccagcctctttgatagttaaaatgaaatattattcttttagggctctagattacaatgtaagattagaatacaagtttcattcaaagtaaagatgaccttttttcttgtcttattttaggaaatgatttattcaactttgatctcttatattcgtttgatagattttaaaaattacttttagctgttcagagagttaatctgacattagtttttccatccttctacatccaggtgaagttcttggatatgagatcctaggaaggagaatgttccttaccccatcctggggttaagatcaccagtcttttgggtcggatctgattatttaggtgcctgaataagctaactaacactgctttgggttaaccaaaaaaagaacttgacttttaagtaacacaactaatttttactgtgtttaaaagtgattttgaaggaatttccaagaagaacttagagttatttcttaagagacacagcatcattggtataaatcagggtttatcaagctttttctatgaagggcagacagaaattttaggcttcatggaccacatgtggtctctctcacatattctttgtttttgtttttgttttgagacgaagtttcatcttgtagcccaggctggagtgcaatggcgtgatctcggctcactgcagcctccgctgcccgggttcaagcaattctcttgcctcagcctcccgagtaggtaggattacaggcgcccaccaccatgtctggctaatttttgtatttttagtagagatagggtttcaccgtgtgggtcaggctggtctcaaactcctgacctcaagtgagccacccacctcagactcccaaagtgctgggatttacaggtgtaagccaccgctcccggccttgtttttatttttattttttacaatcctttaaaaatgtaaaagtcagctttactttgtgggcccatctattctatggatggggtttggccgatgggttctagtttgctgcacctgctggtataagtgtatagtcacttccttgggtcagggtcattctactttggatctatctttgtaatttttttttttttttagacagagtcttgctctgttgcccaggctggagtgcattggcgatctcagctcactgcaacctctgcctcctgggttgaagcaattcttatgtctcagcctcccaagtagctgggattacaggcatgtgccaacacacccagcaaatttttgtatttttagtagagacagggtttcgccatgttggccaggctggtctcaaactcatggcctcaaaatgctgggatcacaggcgtgggccaccgtgctcggccatctttgtaatttttttttttttttttttgagacggagtcttgctctgttgcccgggctagagtgcagtggcgtggtcttggctcacagcagcctctgtctcctgggttaaagcgattcttgtgcctcagcctcccaagtagctgggactgcaggcacgtgccaccacacctggctaattttttttgtatttttagtagagacgggtttcaccatgttgactaggctggtctcaaactcctgacctcaagtgatccacctacctcggccttccaaagtgttggaattacagaggttagccaccacgcccagccatctttgtaatttctaattgtttctatgatcatattttatacccagggatactgtcattttaaagtgtgtataaaatggcttgtcataattttatttttatttttattttttatttatttatttatttttttgagacagagtcttgctctgtcgcccaggctggagtgcagtggcgtgatctcggctcactgcaagctctgcctcccaggttcacgctgttctcctgcctcagcctcccgagtagcttggactgcaggcgcccgccaccacgcccggctaatttttttgtatttttagtagaaacggggtttcaccatgttaaccaggatggtcttgatctcctgacctcgggatccgcccgtctcggcctcccaaagtgctgggattacaggcgtgagccaccgtgcccggcgggcttgtcataattttgtttaaaaattcaacacataaaaaagcatgcctttacttctcaaaagaaacgtaagcagtgaaacttctactttcctttagcacctcattcctttccccagaagtgaccattagtaactggttgttgtatgccattccagactaccgtctgtacatgcatggatatgtacagatgtgtgcagctttgacttttacataaagaaccacgttgttcatccaccattgtgcctggtcactgcttgatagagatatggcaagacaatagttaggaacactttgtcctctcctagaaagtgttgaacaatcttagactctgacagctgtcaccccatgatgacatagcgctcttagctttattcaggacttcaggcaagagtggtttgaaatataaggccaaaggcttttattttaacctgagcattactgagctcttcttcaggacatgcttgcaggtattggaggaaacagagcttgacctgcagggccctttgctttccaaccctggagggcaagtgcgcctgttgcccagggcaggacaattagagaagataaccagctgtgagcagtaggggcttggtaagccgctggggcacagcagtacctgctttgtttcttctgctttcctgggactggcattgaccactgaagctgagaacgggaaatacttattgttgtagtttggaattttgacttggctttccacattgaaatgctgattagatagttggaatactaccatgtttttttgtacataatgggctgaacaggctttcccagacgagtctggaaactaagtatttggtgggttttccaatttatgcgtctattctgagtttcaaacagctgacttacaagtgaatttctaaatgtgattgccaagcataggcccgcagacttcacgtttcactttttccccagagcaatatttgttgtttctggaatttatgtactgccaggggatttagccataggccaataagggtctctctcagaattttcagcaactcagatgaaatggctaggcatttggattttttccttttggttttttaaggatttttataagcaaggccctgagagtcactttgacattcatccctggggaaagaggtctgtggcctaacattgccaggcaaggcctctactcaggagctcagtccaggactgtgggtgagaaaagctctggattcgagagtattcaaatatttgaccatttaagagttaggacaaaggatgatcctgtccccttgccatgtggccagtgcatgtgtgcagtgttcccaggtgcttctgacttacagccaagtttgggctgtggttattgattgacagatactgatgcctttgtccaggaatggtggttgctgactgtgtgctctgccaccctgccttggaaccagcagggcatatgtgagtcctgtccagtctatactcaccagtgactttgccccttagcccgagtggttcaccctcacagtctctctgttagagaagtgagttgtgactatggggtttcactagctgactagtgcctgtgacactggtacatcagcctaggaagtcagttactgggcacagagtcagaagacctgggtttggaaggtgacatctatcacttaaataaaattactttttcagtggaagtgtacataaataaaagaatcaaagtgacttgtgatttgtgcattcattccacagatatttattgtatgccttgtttctgcctgatactactccagcatgtcgattgcagtagtgaacatgacagaaatctctcccttcatgtagctagaagggagtttcgatcttagagaaggtagttagaaaaggtaccactgagaaggtgacattcgagtaaaggcctgaaagggatgagagagcaagcctgttggcccagaaaagaggattccaggcggagggagcgccgagcacagagtcccagaggcaggagccagcctggagtgttggaagagcaggaaagaacctgctgtggctaaaacagagtgaatggaagggagagaagcaggggtgaggtcagaagggtaaagaggggccactctggtgtctgttctgagtagccaggtaggaggcaaggtgaggtacacctctgaagggcaggggatgggagggcagcaggctgggccctgccattcttttgtagtgagcagcgatgccacttctccccttgccttcttcatactgggtagctccagggctctggttttacgttgggtcctcagtgttgagaggtgttggtcctctatgtaggcagtccaggaacccagggcagccatggggctcccaggagttgtatgtctctaaggagactgtattttataaattccagcatttttattgacttttcaagtatttaccatcttgtgaataagcagccagacttatatgtatatatacgtattatatatatatatgccagacatatatataaaatatgtattttttatatatgtatgtatatatatacacatacgcacacacatacatatatatacttatatatacatatatacttatatatacatacttatatatacatatatacttatatatacatatatacttatatatacatatatacttatatatatactatatatacatatatacttatatatactatatatacatatatagtatatatatactataaaatatatatactataaaaaaaaaatatatatatatatttttttttttttttagagattaggccttgccatattgcccaggctagcctcgaactcttgggctcaagcagtcctccagcctcagcttcccgcgtatctgagactgcgtagctgagactacaagtatgtatcactgggcctggctctcaaatctttacacagttgcatcttggctttcagtttgacacaacaacaaatttcttttgtatactatgtgattacctgtgaatatgtttgaaataatttatctgtgagtgctgactgactcttaattaaggaccttaattcaggtatattaacatttattttggatagatatataccagaaatattgtagagtaacaataatggaaaatattagaagctggtttcaaaaatacgatttgcattaaccttaatggaattgaatgtgcatcctgttccttttttttttttttttttttttgccctaaaggtaaaagtaagtgttacttgttttgactggtagatcttctgtaacagattatggagtaaatatttcctaatggtatgtgccagatgaaagttcatattgctgctgctaatcagaaactgaagttcacctcataaaaagcttgtatgaatccagttttgaaacttgctaatttcaggtcagtgtttttggcttacttttttgctgaggtgaatctgctattacctaaattgtcttcagactttagcctgtagaggaagctgtacttaattaagcagctggaatttgggtgattctgtaaatttgcattgtggtcaacaaacatgatttaccatctgtctagcccattctacgtgggtggaagccaccaaggccattgggcatctgtcactgtggagggactggaccctttgactttgatttgtcaagacaagcatgtgcaaccaactcattattctgataaatgctaattaaaaggagaaaagtaaggaaataagcaaatttcctgcttttccagtagaaactgtttttcatggtaaccaaatagccctaatggatgagagaaaaatctccactttgcagactgtgatcaattcggtgactcaaccagtggccaacagtggaggatgaaaccatttgttggaaggttgctgaggaaccgcatttgggagaatcaggccttccgcacccaaatctcattgatcagccttagtgtcatggaaatggagacaggtcatcacgtctcctgatgtgctgcagcaagaaccgcacaacacatctaatattaataatattctacttctccctctttaaaaaaaaaaacaaaccctgaaataatctaatcaagcttctaaaatgaatccagtctacaggaaatgtggggtgtagtgacgcaagttatgcaataccacgagaaggcaaccagacaaattcacaatgtggcatatcctgtaataagttgacctgatttgttcaacaagtcagtagcattaaaagaaattacacagaatgtactgttctagattaaaagagttaagcaatataacaaccaaataaaattacctttttggggttgaggttcaaaccaaatgtaaaacataatttttaaaagataagttgggaagcttgaacacatactgagtcttggttgattgggatttacttcaaaaaaagaaaaaagatggggaaggatagatggtaaaagcatggcaaaatgttaatggaattgaaacttttaatttttttgtagagacaggatcttgctgtgttgcccaggctgtgagcccaggtctcaaactcctgggctcaagtgatcctcccacctcagcctcccacaacacggggattataggcttgaaccactgtgcctggccataggattgaagtgttttgatgggtacatgggggcttgttatgttctgcttttgtgtacgtttggaccttttccaagtttgcaaaaagtgagagagaaattcaggaatgtattaaagacgtaatatatcagagtacccaataaataactccatttcatggagggcttttcgcatgtgaagtggtcttctaacagaaaggggagcattattgagtagttagaaaacccaaggtgtagggatgaagagaaaagcaggtgttcttcaaaaaaaatgaagagagtaaaagtgaatcaaaggagaaaatgggaacagagaaaagaccgtctctgaaagtgggaggccagcagcaggtgggagtcaaggaaagaatgaaatgttgctaattttggggactagtgattgaatggcaatgttgctgtctttttagagagtaggatttaaaattttgagttgctgaaaaggcttgcgtgatgtgctagaaaaattaggtttggtgggcagattagaaggaaacaaataggagagttcatggaatataatttcagatagaactggctttcctgaattaattttttggttctagtcagcttaggagatctcacaggattggataatggcctgttctggcagcctccctcctctttacaaaccaggaacctgagcacccataaaacagcatttgcctgaagtccttctgaggccagcccatgtatgggttatgtgtcctatgtgtctgctgcctccccactgcctcgggccagtgcagtctagtgcagaggggcttgttggcagaggccatccccctgtgagaacaggctgtcttgcccctctgctaatggtgaaatgtccagagccaggaaatcagaaatagcgtgatgtagaggcacccctgagcacccttgctcgcactagggcccctcctgagtaggcccagccacctggcctgccttcctcttctcccagctgagccacccaccctcctcgataaatacacatgagctagctgcaagcattgcacagatgacaaggacaataaaagcactccaggactggtaggccagataaataaatagactggcactaggtgtgatgagtgctgtgatgcagatggaaaatagcctgaagtctgttgattcggcaaaactttcaactgctcctctccccgcacccagctcactgtgccagggccagccctcataccagaacctcctacctaactgagagcgcatctgagcaggggcagggcagagagcccagtaggccctggggagagtgaggagatactggtagttgcctctgaatatccaatctcttttttcttttttcctttcttctttctttctttaccttctttctgcccccgcccccccgcaagacagggtttcactttgttgcccagggtggagtgcagtggaacaatcacagttcactgcagcctgaactcctgggctcaagcaatcctcctgtctcagcttcccaactatctgggtctacaggtgcatgccaccacacccagctaaactgtatttttttgtagagttggggttccattacattgcccaagctgccattttttcttagtaacaaactctcattttgttttccatactgtacctggaataaggactacacctcttagttccttaaagctgggagtggtcacttgaataagatctggttcatgacggtgtaactagaagtactgcatgagattagtgggatatctccttaaggggaaattggtgctccctcctcctccaattttctaccgtctccagtgcgtgcagaatgactgatggccatttaaccatttataatcgtgaagtcacctagaaataggagcctcgcatgagtgtgccgagcagaaagctaggaagtgggctccttgtgatgccctggcgtctccattccaaccctggtccatctgctctggatttgttttaccttagaaaaaaataaacataatttttttttcttttcccccctctgagatgtagtttcgctcttgttgtccaggctggagtacagtggtgcgatctcggctcactgcaacctctgcctcctgggtttaggcgactctcctgcctcagcctcccaagtaggtgggattacaggcgtgtgccaccacacccagctaatttttgcatttttagtagagatggggtttcaccatgttggtcaggctggtctcaaactcctgacctcaggtgatccccctgccctggcctcccaaagtgctgggattacaggcatgagccaccacacccggcaacatagttcttatttaagccactgtattggttttgggtttgatttttttttaattaaaaattattattattatttttatttttactgtagagatggagtctcactgtgttgcccaggctggtctcaaactcctgggcttaagcgatcctcctgtctgggcctcctaaagtgctgggattacaggtgtgagccaccatgcctggcctgtttctgtttttgtttttgttttgttatatgtagataaacctgattctaattaagtggaagcaggaagactagttaaggggctattagagcagtctaaatgagggatgatagtagtttggaatagaagggtagcagacgtgactagaagtagttatgtgtatttttactgtggtaaaatatatgtaacataaattttgccattttaaccattgttaagtgttcagtagtattaagtacacttacattgttgtgcaagcatcaccatcatccatctctagaactttcttatcttcccaaactgaaactctgtacctgctcaacaataactcctggttgccctctcctcccagctcctggcaacgaacattctttctacctctataaatttgactactctaggaacctcgtataaatggaatcatagaatatttgtccttttgtgacaagtgtgtttcacttagcataatgtctttaaggctcattcatgttgtagctcgcatcagaatttccttctttttaaaggctgtggccgggcgcggtggctcatgcctgtaatcccagcactttgggaggctgaggtgggtggatcacctgaggtcacgagtttgagaccagcctggccaacatggtgaaaccccatctgtagtaaaaatacaaaaattagctgggcatgatggtgaatgcctgtagtcccagttactcaggaggctgaggcaggagaatcgcttgaacctgggaggctgaggttgcagtgagccaagatcgtgccattgcactccagcctgagcaacaaaagtgaaactccgtctcagaaaaataaaaataaaaataataaataaataaaggctgataaatattttagcagttgtattttgcatggtttatgacatgcgcacctgggtcactcactccctggtagtgctatttactgagatggggagtagtggggaagagtaagttcagataataggtctgtgatgcctattagatatcccatgggtgatttctacaggatagttgcatacacaaatctggagttgagggttgaggtccagaacttggagaccctcagtcagtagacagatgtaaagctagagaactgaaggaggtcatcaaggaagagcgtagctggagaatgagtaaaccctggggcactcccacatttacagtcagaagatgaataggaagccgcccaggagtctgaaactggaacagctggagagctaggaaggaaatgaagcaagggtgatgctgctgaggggaggtgaggcctcctctccaccccattccaagatttgccatggttacaccacttggaacactgtgcagatacagccggctgggagtgtccctgtcagatggggatattgggatccctgtctcagtgcggcaacatgggaggcatctagtgcgacagagcggcctcacccaagtgatgtgtcatgatgaggataatgttcatggagactgatttccatttgccagttccctgtttgtctttgtaatcagtttatcaatagtattcttgatggaagtgacaaattttaacaaaaagtacactcatgtgaacaaaaagaattttctgacctctgatgggctcttgaggccatatatcaggataacttaaatatgtttttatctctgcccacaatgtaaacttgtttatggagaaaacttgcattttgtttttatttattttttgaaacggagtctcgctctttctcccaggctggagtgcagtgatgtgatcttggctcactgcaacctctgcctcccaggttcaagcaattctcctgcctcagcctcccgagtagttggaatcacaggcatgcaccaccacgcccggctgatttttgtattttttgtagagacagggtttcaccatgttgactaggctggtcttgaactcctgacctcaagtgatccacccgcctcaacctcccaaagtgctgggattacaggcatgagccaccgtgcccggccaaaacttgcattttgaatgggaaaaattactcaagagtaattaacgtggactcagttatcttgagtggcctttcattttttccctggatgatattttgtaattattattattaggtatgctaaggtttatagcagtgtagctgctataaatataaatatagaaatgtaaaacttcctgtgtgtattgatatggtaacagatttttaatatattttggaaagcaaactataaacacacaatctactttttgcaaaaaaaaatctataggtacaaatatgggctgtttagtaatcgtacaatcaatggttatacctatttaggaatatttagaactatttgtatgtttgtatagctaatcttttcccccctgatttattgatggtgagtattactgatacaaaaagttttgtgcaccacagtgctttgcccatgaaatatgagctcagaaactgcctgtgctgttattttcaccagcagtgaagcagcgtgtctgggggcagaatgtactcttgtctgaattattagcatttggtgttggttctgccacccttgggcctgagcttgctttctccctcgtttgttctaaacatagcatggcaccttttgtatcctgtaggttattgctgactgcaaggagactttgttgttctttagttagttttttacatattagtttcagtaagcctgtttcttacatttttctactgtagcataatctttgtaagtactttctatagcccaggcatggtctgctgcattctctgtgtctctggggatgcatttaggtctttgtgtcacattctggtgtgtagctcattatgtaatgactcgaatgatcatcagaacaaaagatacctcattaagaacaaggttgaggacactaggaacctaatgtaacatttaaggtataaatgagtattgaagagaaagaaatgattgaatgctttggaatttctaatacaagcacccatcttgtacctacttacactggacttttaaagtgatcggaaataaatggttgtatgagagttttacttgttcctcattctaaagggatatgaaaaagatgaacttgagttcatgaagttgagcagaacaatgaacttagtgataaattatttgtattgatgtgaaaatcacaccatgttttgggaaatggggtggacttgggcactccatagttccaaccacatgcaggtattataggctgagtcaggcctgagcctagaagaggaataactgcaactaaactttgaaatattccaggaaagcagagttgacatgtaggttgatctgcaacaactacagtggtatagaaagggtggtcttggctgggcgcagtggctcacgcctgtaatcccagcactttgggaggccaaggcgggtggatcatgagatcaggagatcaagaccatcctggctaacacggtgaaaccctgtctctactaaaaatacaaaaaattagcctggcgtggtggtgggtgcctgtagtcccagctacttgggaggctgaggcaggagaatggcatgaacccgcgaggcaaagcttgcagtgagccaagattgtgccactgcactccagcctgggcaacagagcaagactctgtctcaaaaaaaaaaaaaaaaaaaaaagggtagttttttggtgctccaaatgggaaggccttaaattaaaatctgttttacaatctgaataaaatataaatatcatcaaaaagaaaaggtattctggttatgtacatgaatacaacatccttagcagcagatgttgtgtgtgtgcaagggaataggaaggtaaagatgcacccttctcctccaccatcaagggttgctagaaaacaggctctcattcagtagaccccgatagctgtctgtaatccatagctccttctctgattagtatttatccactattgtggcttcattctggatcttgtcataggtagaaagagtagcctggtggttagcaacacagttttcggagtcaaacagacctggtgtcagatccctacttattacctgcttgacattgagcaagtttctttatctctgtaaacttcagtgttatcatccgtaaaatgggtgaattgctcacaccccacagggatggttcaccaaacataaggtgcttggtatttaaacactcaataaatggtagctgttgatagagcttcactggcattttaaacttaaaaacctgcctttggccactctgctcatccactccccagcttcccccatgtgttctgcaatttgactgaaccacacagtccaggaaactttctccatgtgaaggagaaaatagctttccacagccctggggtcacactctcccaaacttatgtcaggaagacgcccaaagactggctcattcctgggtcaaggagagtggggtctgtttcaggagaggagctgagctaagacctgagatcctcggaggggaaaggtgggcagaggcaggctggaggttgagctctgtactctctcaagagaaggtggtggttatgcatctgttactctgggtaaatttttagagcagatatctgatgaaacagctgtttccaaggtccagcgttaaccattggtttgattggctttgaataagttatttacaacacagatattttgttacaatcataatttgtatgactgagttggtctccaggcatcctgggtaggagagggaggtgtacagtagctgagctgttgtcctcattccttatttataggaaagaagcttaggttaaatgactcatccaaggtcaaacacatcctaagtggtggagacaacacagacaatgccttttaaactgacctgtgtctcttcccccactccttcctacagcagggttctgccctccttactgccaccccacagcaagagggcttcctccacctcattctccccaggggtgatggccttgtcagagagcatcctgttcttgatctgggggccctccttcaggccttcagccattcctcagaactttgccccttagtaggggaggggacagggtagctctccctttgccctcggtcatttccttgaggagccttttccttcccatccgtctgtgttcctttcccagcagcacccggccttgcatatctgttcattgcctgttgtcttccccattagaatgtcgccctggcgagagcagggacttgctcattctctttccagtagtgttcccagctctttgtgcttggtgcatatcaggcatccccatcttatatatttattgagagaatgaatgactaagttgtgtccatcagagctgtgagagtgtgaacccagagctaatggagcatggcgtcttccctttttcctcctcctccagcttcccatagctgccaaggtgctgaggaaggagtgggaggaatagtttgtgtccctgaggagccggctcactccccctccctgtgtctgcagtgggtggggagattgaggaaaccctcagcctacaccagttaaggtggagttcctgtcacatgcaagccgatgccagtttagagtctgctgaaggcagtggggcacacaggtgaagggcatggacacttgagtcaggtgactggtccaccacatgcagattgtgtcccgttgacaaaattttgtagcctttctatgccttgatcttgttgtctatgaagggaggatgacctcatagggtggttcctgggattgaatgcgctagcccatgtgactctccagcattggtcaggtacaggctgtgtgctccactaaagctgtctgtgtgctctacaggactaaatagctgctgcttattctactcctggcacctgtctaactggcctaggtgcgctgccttcgtgtccctcaccctgcccagtctagcacagagcactgggggaagggctctgaaggaggtgtgagtggaagcccaggagtttggggggcttcagcctgtgatgtcggttgttgttccctctggagggcaagtgctttggtgtgagatttgtgtgcggttttttgtttgctttagtttggtcctggtgatttccacagggtgaggagggattcggagataataagtgtcttgctgggaactggcttgcccctgcttctccaagaagaaacagctctgactcttgggaactgagagggcgtgtggcaaaggtagatgctgaggcgaggcaaggcgagaggtccacatgcgtgccacaaggcagagagtccacgtgtgcacctgaggggagaggaaggttgagtcttactgtgtgctgctcaagggacaggacagtgcatgggcactgtgctggattttggttccttgtaaaaagcaatggctatagttccctgaccttcaccacttgcgtgaggcagtgggctgagggccggctgtgagtaggctctctcaggtccactcctgctcagctgggtgaattgcaaactcaataaagtaagttgttgtgaataagtaatctgcataagccaaagaaatataaaatatcttccacaaaaaattattagggagcaggataaaagagctgcaaaaggtttttgttggtattattgccaaatctgatgtgggcaaaacaactatgagaaattaggaaaaaatgtcaataatctggaaggtttgtggtcaagttgctttgtaagtggccagtttttgccctgtgttaaagaggaaataaggccgggcatgggagctcatgcctgtaatcccagccctttgggaggccgaggcaggtggatcacctgaggtcaggaattcaagaccagcctggccaacatggtgaaaccccgtctccactaaaaatacaaaaattagccgggtgtgatagtgcaccgaggtcagagaatcgcttaaacccaggatgtggaggttgcagtgagccgagatcacgccactgcactccagcctgggtgacagagcgagactccatttcaaaaaaaaaagataaataagaaatgatagagaacacattgtaactgtggtttatgcaagaaagtaacagggaggagcagcaaaggagctgtcagaacagccttagcccataccagaaggctgccagagaaatgcacaatcatatctgaaaatgtttgtggcacatagtatatatttagtatacatcttattataattacatattcatgtgtatagtattttttaagttaatttcctacttggactattagcaaccaatcactgatatatatcaggttaatgggtttctactgtactcatgagtggagctgtccattatattttcttgactcctggaagactggtctgtcagctttgtttcctaagactggaatgatgacatacaactatgttaataactatgttaacactcctactaaaataaccggtatatttggattccattttcaacggaatgtcttatggtcaaactggccttctttcagatttttagttgcatggtttttcctttaccttctgaatactgtatggacgtaattgctgttgtggatggctgtggttcagcaggagctcaaagacaccagaagtggtgtgagtccagatatagggggtggagacaggattgggggttacttggtgggaaatgggaagaattatttcaaccttgggccttgttatttgatggaaatgttttgacttccaggcatcagtcaccgaggtccaaacacaaaaacaaaggcagatccttctgaagcatggtggccttttaactttgtatgattttggatttccagttaactattgcttctattcaagttggtcattgaaaatttactgcgcgaatccaacagcaacccacaacctaaacatccctggctgtcttgttttcacaggtgttggggcgatgtttcctgactgtggtgcaagtccatttccagtttttgactcatgcgttacagaaggtccagccggtggctcactcttgctttgctgaggtcatcgtgccagaaaaaaagaacagcggcagtggcggcggcttatctggcatgggccacacacctgaagtagaggaagctgtgcggtcctggcggggggctgctgaggtaaccctggctttggggagattggtgcctgtgttcaaataggagaggctccagagggcctttgcctgttgattctcaaaacagccatttcatttagaaatgtacattttaaactgttatcattggcttgttcattcatttaacagtgaacatctttgtgaatgcccactttgtgccaggcatgtgccaggcactaggatgacaacctctactcacagcctcctgggagaataggcttacaaaaacagggctaaggggccaggatggagatatgcgggagccagaggaagggagggccctgtctctgaacggtagtgctgcaggaaagcttctaagatgggggaccagtgagaagaggctggcacccaagtcaggaaagacggggtggagctgtctggggagggtaagtggccagccaggcagcgaggcaggcgagcaggagtgtttggcagacggatgggatgacaggctccaaagatacaaccacagcagggcgagagctcagtggacacagggaattttgtgttttttgttagtcaaatcattccctatagaagtgcttggaatctttgtaactttttaaattctttaagtttttctttttctttttcttttttttttttgagacagggtcttgctctgttgcccaggctgaagtgcagtgctgcgatcaagtctcactacagcctgtacctccgggctcaagagatactcccacctcagcctcttccaagtagctgggactacaggctcatgccaccatgtctagcttattattattattattacttttttttttttttttttggtagagatgaagtctcactatgttgtccaggttggtcttgagctactgggctcaagcgatccacccacctctgcctcccaaagtgctgggattacaggcattagccactgcacccagacaagattcttttttttttttttttttttttttgagacggagtctcgctctgtcccccaagctggagtgcagtggcgtgatctcagctcactgcaagctctgcctcccaggttcacgccattctcctgcctcggcctcccgagtagctgggactacaggcgcccgccaccaagcccggctaattttttttttttttttttttttttttgtatttttagtagagacagggtttcatcgtgttagccagggtggtctcaatctcttgacctcgtgatctgcctgccttggcctcccaaagtgctgggattacagatttggacaagattcttaattggtctaactctgcctagatcctcatttgtcagtgctttacatgtgatttcagcagttctccagtatgctttatgtgacttcatgaagtttttttttttgagacggggtctcactctgtcgcccaggctggagtgcagtggcacgatcttggctcactgcaacctccgcctgccgggttcaaacaattctctgcctcagcctcccaagtagctgggattacaggcgcccgccaccatgcccggctaatttttgtattttagccccagctaatttttgtatttttagtagaggcagggtttcaccgtcttggccaggctggtcttgaactcctgaccttgtgatccacccaccttggcctctgaaagtgctgggattacaggcgtgagccactgcactgggccaacatgaagtcttttatcccttggaagatcagctatttcccagcacagcagatatgtttataaaatctagccatcatgcaagagctagactgagtggttggctccctagtggatagagagcgcagtggtgtgggatggtatggcatggtcatcagggataatgtgaaggagaattgtgggattctcctctcgtggtgacaacctcatgactaaatggtgggctgcagggagccgctccggtggggggattctagcctagcgcagggttgctttcctagtcactctggtgtggcattctctattccttttccacagccagaagaatttaagcttaaataaaaggcaatcaaaaacagctctgaaaaagtctgttttaaggagactttgcctataatcagtgacatttcttttgggagacagagtttcgctcttgttgcccaggatggagtataatggcgtgatcttggcttactgcaacctctgcctcccagattcaagccattctcctgcctcagcctcccgagtagctgggattacaggcgcgcaccacgacgcctggctaatttttgtatttttagtagagataaggtttcaccatgttggcctgactggtcttgaactcctgacctcaggtgatccacctgccttgtccttccaaaatgctgggattacaggtgtgagccaccatgcctggccattagtgacatttcttgtaggcattttaatacttatttctttccagtatgagaaataaaaaataaatcttagaagttgagactttaggacttactgctccattttacagagtaaaagataattttcttttttttgagacggagtcttgctccttcgcccaggctggagtgcagtggcgcaatctcggctcactgtaccctctgcctcccgggttcaagcaattctcctgcctcagcctcctcagtagctgggattataggcacccgccaccacgcccagctaatttttgtatttttagtagagatggggtttcgccatgttggccaggatggtctcaaactcctgacctcaggtgatctacctgactcggcctcccaaagtgctgggattacaggtgtgagtcacccacctgggccaaaagataatttttttaaactatcccagcaggcaaacacagattaaaagataatttatggttagcaatatagtgattcattaaataatgtctagttcaaatcattccataattaacttggcaaagtatttcttttctttttttttttttttttttttttttttgaggtggagtctcgctgttgcccaggctggagtgcagtggtgcgatgttggctcactgcaggctccgccccccggggttcacgccattctcctgcctcagcctcccgcgtagctgggactacaggtgcctgccatctcacctggctaattttttgtatttttagtagagacagggtttcactgtgttagccaggatggtctcgatctcctgaccccgtggtctgcccgcctcagcctcccaaagtgctgggattacaggcgtgagccacggcgcccggcctagtatttcattttatgttttggaaattttctttaataaaattttcaaaacatgatttttcacatgttaatattgtccagtctctagttttattatttcaatttcatgccatttgctgcattgttgtcatttctttttaattttcactgttttcttgcatgttttggtctgtctttcatgctaaagacttcctagggctttctttctgttcatcagaaaggccctggaatgctaattggaggctgtgtgtgggggtgggacctgttagctttattgtagatggctaagccctgaggtccagacctgcaccttgttgccttgtcatgtgactttacaaccctcggtgtcctcctggctgctgggccccagcctcctgactgttcagctcacacacgtgaacctaacacctgccttggtcccctgctccatcttctagacaactcatgctgaggaccagcccacaggaggaggcctccgagttctctcttgacgtcttcaccttgaccttttttgccaccattttagtctgtccaggcctttctgccctttctacattccctttgctttcagccagtgatgccaccccctactacactgagcaaatagaatctccctgatggcagcccttcttcctcatgtggccaagccaccaccactcctgccatccctcttcacaaccatcttttcttccttcccctgcctcatgacagcagaggaggtgccctctcctcctgtccaggcttgccccgtgctggccttgcccccatcctcgagggcccagcttctgtggtgcgacctagtgttttctctccctcatcctcagcctgttcccaccagtacacaaagatgcttcccacagaaaagtccactctgccctgccctgtttctctgctcttttctcagccaacttcttggagtagttgtctacctttttttcacctttcattcattctaaaaaattactattttatttttactgcaccttgtggctccttactgctcctggcacaccccgtggacagtttactcagagtagtctaaaaagtaattattattgaagtatttcaggcacatagaacatttcacacccatcagtgtatcttccttttagctgcctgccatatttgctcatgcctgttacatatttttaacagaaaaatatcaccagtgcacttttttttttttttttttgagactgggtcttgctctgttgcccaggctggagtgcggtagtgatcacagcttactgcaatcttgacctcctcggctcaagcaatcctcctgagtagctcagactataggcatgcaccaccatgcttggctaattatttattttattttactttttatttatttttttaaagacagggtcttgctatgttcccaggccggtcccaagctcctaggctcctgcacccggtctgtaaatgcacttgaatcccttttgtacctctccactttcttattcatccctttgtctctagagataacctctgttgaatttgaagcgtgtgatccttgtgcatattttaatattttttccgtatatgaatgtatctatacataaggtattattttacacagtctgaaactttatatacataatgtcattcagcttgctgaaatctggcttccactcctatacaagaacatgccttctcttatcaaggtcattggtgccttcttccatgttttcaaatccagggaaccctttcaacaactttcagcagctcacagcagtgtggagaatattcctccttggaaatactctcagcttgtgacatccaagaaccaacctttctttcctcttgggtcatcctttcttcatctagtttactggcttctccttcctcaacacaatttctgaatgtgagtttctccaggctcagttctagctgcccttctccctaggggttctccatccagtcttgggactgaaaaaccacctgtgtccttggagggggctcaaatgtgtgtgatcagtgagcagcccacttcctgtgggcttcaggcccctgagctcagctgctaccgggggtctcacaggtggctcaggcgtagcctctctccactcacctgttcctccctagaccctctctatgctagtgagtggtgccatcccacactggcttcacttgagaaacctgagatttatccttcagcatttccgtcatgtctacacccagtccaatccttaagaaaacccggcagttcccacctccaaaatcttatcccagatctgtccccttcttccacgtccttcatcgctacccttgttcagggaatcgttacttctcccctccctgtcttgctcgccttcattttaaaattggatgatgtcgcttctcatttccttagggtagcatgtggacccctcagcacgacctgcctagacctgcctagtctggctcctgccttgatggccagccttatcagtggccaccctgccctcgctcactgggctctagttccttggatgtgtctttctttgttaccttggatcctcggcctgtttcacggacccgtctgtaggtcttgacaccccccaccccaccccacacacatgcaattccattcacgaccttctcctctaattctcaccctaagtgctgctttctgggtgtctaggacattccctggtatagtcctctgtttgtttcccgcagtgttttttctccatttataattctgtgttttctttgttcacctttttggccctgaggctctcagctccaggaaggtaaggagcagctttgtgcttcagcacgtacctaacataccaccttgtgagctaaatatttgactgaaagattcttagaaagagtcaaacagttttaaactgtgagactcttaggcttcaggcaatggtgtttacatacagtttgtgaaaccaaagctttggaactttacggcattatagctgctagtcattttcctgtagtctgcaagttttgtaaatattacaactcctacactggcccagcagaacaaaagctaactgctaaaaaatgttacttggttcacagaattgcaacaaaaatagaaatctaaaaacagttcatctggaatcccatctaataaatcaaatatatatttttctgtattctcttcttgtcctgatccatgtatctgttttctgcatttaatcgtaaaatgacagagattagtttctccttttctatcttgcttatctactcttcataaacatatgtagtgactgaataataaatatttacttttctgtgcagatttcaaaagctctgtttttctgttaatatgccaatgtatatttttcctgttatgtattcatgtggtcttttccttcactgaataggaatgccaaccatgtatgttcttcctttttttttttattctggaaactccaagtaccaatattctaggtaacctgtctttttaaagcaggaaagttaaaaatgtctgagtatatacacacatatatatgtgtgtatatacatatatatataacaaataacaagtaggtaagtcttttttccagggttcctaaaataaagggagatttcggccgggctcggtggctcaagccagtaatcccagcacttcgggaggccgaggtgggtggatcacctgaggtcaggagttcgaggccagcctgaccaacatcatgaaaccttgtctctactaaaaatacaaaactcaaccaggcgcagtggtgggtgcctgtaatcccagctactcgggaggctgaggcaggagaatcgcttgaactcgggaggcggaggttgcaatgagctgagatagcgccactacactccagccagggtgacagagtaagaccttgtctcaaaataaaataaaataaaataaaataaaataataaaataaaaaataaagggaaatttcctttctcttcaggatggttaattaggctttcaaaatttgggctgctcactttgcaatacaaacaatctagaacttctagtttatttgcttagatggtttattgctgcattttacttgagggggtttttcttgttgttgttattgttggtctaatgttgctagaactgtaccaccctcttttacctaccagttactatatatgttacaggcgacatctagactaagagaaagaggctgtgatggttgcctggcaggaattgaagttcaacaactcttttgttctcaaagtgcagcaattcctgagcaccagctaaaagaactgaacataaaaatcgacagtgctttgcaagtaagtttttcagaactgacatactgatttccacgggatagaaacaagggagggagttaaagttgtgatgttgaatcaattagaaagggttatagagtagtaattgaccttttaatagctatagaaatttaagatttctatttccattgaactttgtcatcttataatttgctttacgatcttgattgttaaaaataatttatttccaggcatataagatagctctggaaagcttaggacactgtgaatatgcaatgaaagccggcttccacctgaatccaaaggcgattgaagcaagtttgcaggtacacttttccttcctaaagctctggggacctatggcgctgctcctgcagtctagtgtgaaccaagtgttttgacagatgagcgatgggtcacctctcctcttccatccatgccttttccagggctgctgcagcgaggcggaagcccagcagacggggcggaggcagacacccccgcagcccatgcagtgtgagctccccaccgtccctgtgcagataggatcgcacttcctgaagggcgtctcctttaatgagtcggccgccgacaatctgaaacttaagacggtagctttccatggggttccagcaaatgagtgtgaacttgaaaatagagttcttaagagaaatgtaaaggcttgcgaaggatgtagattaaaaaaaaaatggggccgggcgtggtggctcacgcctgtaatcctagcactttgggaggcgggcggatcacctgaggtcaggagtttgagaccagcctgatcaacatggtgaaaccctgtttctgctaaaaataaaaaatcagccgggtacggtggcacgcacctgtagtcccagctgttcgggaagctgaggctggagaattgcttgaacccatgaggtggagatggcagtgagctgagattgcgccattgcactccaacctgggcgacaagcaaaactctgtcttaaaaaaaaaaaaaaaaaattaaaaagcagacctacggagactttaatcagacatttgccaagcaagttttcgttttgttttgttttgtttttttgagacggagttttactctctcgtccaggctagagtacagtggtgtgatctatctcagctcactgcaaccttcacctcctgggttcaagcaatcctcctgcctcaccctcccaagtagctgggactacaagcatgtgccaccaagcctggctaatttttgtatttttagtagagacggggttttactgtgttggccaggatggtgtcgaactcctgacctcagctgatccaccctacttggcctccaaaagtcctgggattacaggcatgagccaccgacctgggcctaggcagttttattcataattttattcagatgtttaacagaaagggtttgaaagtacactataagatattgtttatgattaatgtctctcagtggacttgtatgaattaaataagaagagagatgttgttataatgctgcagtgataacgattatttgtggaacatcatgtgttccagtcattgtgccaggtgctccacatcattgtctcacttaatgctcacccatgaggtaggggtgctgccctttggcccacctgccacatgggaactgatacccaaggtcacacagctagaaagtagaagagctggaatttgagcttatgtaatctgtttccagagcctgaacacctgactacttggtcatccaaaataaaattgagattttaattagtatttacttgtatcagatgattttgtttccctatttggagggattcagaatttcagaattcctcaaccagttcacatcagtagattgctaaataattttgtgctagtatagaaatacctgtgtatattatcgcatatgtatccatatctagtcatttactctatggggctgagaaaatctctgagagtgattgatgataattactaaggaaattaaaatggcataattagggtgtatttaaaatgctcttcttgagccaggcgtggtggctcatgcctgtaatcccagcactttgggaggccgaggtgggcagatcacctgaggtcaggagttcaagaccagcctgggcaacatggcaaaactgcatctgtactaaaaatacaaaaattagctgggtatagtggcaggcacctataatcctagctactcaggaggctgaggcagaagaattgcttgaacccaggaggtggaggttgcagtgagctgagattgtgccagtgcactccagcctaggcaaacagagcaaggctccatctcaaaaaagaaaaaaaaaaaatgctcttttcccaggagttcaagactagcctgggcaacatagcaagactccacgtctacaaaaaatttaaaaattagctgagtgtggtggtgtgcacctacctgtgtggtcccagctactggggaggcttgaagcaggagaatcacataagcctgaggggtctaggctgcagtgagccatgttcgtgccaccggactgcagcttggacgatagaaaaatacataaataaaatgctcttctcttgaggatgattgtataaatgcatttttacaaattttagaaccttgcatggctttgtcttgaggtgtgaactctcttcttatcaatctatagcatacaatgttacagctgatgaaggaggcaggctgctataatggaatcacatccagggatgattttcctgtgactgaagtgctgaaccaggtttgcccttccacatggcgaggtgcctgcaagacggcggtgcagctgctgtttggccaggctggactggtgagtgagcgtgggtggtggatgataggtagaataccaagatgtttcaagcatgtgaggatgtggtgcagacacatgtgtgaaaatattgaataatttaaaaagttatttggtgctgtggaatttagaccaggcaggtagacaaggtaaaggaagagcagcatttaaaaatctctttaaaaagaaaaaccagattgataatatatatttgcagggaacctagttgcaaaatgatgctatgggctttgcttattttaagaaaaaaaccattacagtctgggccccatggctcatgcctgtagtcccagcactttggcaggaggattgcttaagtctaggagtttgaaatcagcctgggcaacatagtgagaccctgcctcttttttttttttttttttttttgtgtgtgtgtgtgtgacagactcttgctctgtcgcccaggctgcagtgcagtggcgcaatctcaactcgccgccttctgggctcaagtgattctcctgcctcagcctcccaagtagctgagatggtaggcacccgccaccacatctggctaattttttttttttttttgagatggagtctcgctgtgttgcacaggctggagtgcagtggcgtgatctcagctcaccacaacctctgcctcccgggttcaaatgattctcctccctcggcttcccgagtagctgggactacaggcacgcaccaccatgcctggctaatttttgtattttttagtagagatggggtttcactgtgttggccaggctggtctcgaactcctgacctcgtgatctgcctgcttaggcatcccaaagtgctggaattacaggcatgagccaccacacccggcccttaaaaaaaaaagaaaaaaacattacattagtaacaagttgacagggccacttgatctagcccctattctggagctacattggatgtctgttgctcaaacatcccatgcttcttcctgtcccaggcctgtgctcttgataccccttttatctgaaaatactcttctctctgattatcatgtaggtcactccttatcttcttggtgttagctccaaaatcacctcctccaagaggcctcccttgaccacagtggtataagtagtacccccatccagtcactgtataccgctgctgtttatctctttcttagcaataaagtaacatcaactaaaaagtaatgatttgttcatttcatctttcagagaaaaaaaaaactttgcccagagttgggtgggtcaggagatcaacatctgaaatcaccatttagctttttgtttgcatcactgacccatagaatcttacgtatttgatctccctttctagtaaacgactacttttcaaaaacatatggtggcagggcgtggtggctcacacctgtaatcccaacactttgggaggccgaggcaggcagatcacctgaggtcaggagttcaagaccagcctggccaatatggcgaaacctcgtctctaaaaatacaaaaattatccaggcgtggtggcgggcacctgtaatcccagctactcgagaggcttaagcacaagaatcacttgaacccaggagtcagaggttgcagtgagccgagattgtgccactgcactccagcctgggtcatagagtaagatccagtctttaaaaaaaaaaaaaaaggatatggcatttcagtcagaggttggaaggacctaattagagattaagaaaattaaagaacttgttttttagtctggttcctactttattcacaaaaagagctattgagggtatactgtcgttttgtttcaagcgggttagggctcaggtggcccagctcacagtggggctgtcttgtggaggctcagatgagggcttgttcacagtaatgagtcacatttcctttgggatcttttcctcagtatagggacctccaaaagaagtagtaaaccagagatgccttgctgaagcgtggaagagcccattggctttagtatatcgatccatattcccagagaccatttagctgaaactgcaaggaccatgccaatgagttcccctgaaaggagtatgcaaaataaggccaaaaggcacaaaggctgttttgagaaaacactgtagattaaaaaaaaaaaaaagttccatgttattcagagagcagaaacttcttcctagttccttgcgtcttgattgtaggacacatttctgtgtgactttaggttatggttctggggatgggaggagagaggaaacacctgtgtggtccaacaatggctattcctttgacaggaagttttttccaaaggtcattgcagatcagctatgggaactctgtttaaaccagtgaaagctggctccattagaagctgaatttggagtatgatacacaactctgtacagttttaccccttctgaaatattacagatttggttttaaaatattttatgattttttaaaacattcttttagttatttgaaaatatattcatcactttgtcaaactctagattacataggatactcttatcacctatctagtattaaagactcttcctggaaataagaggaaatcattcaaagaagggttagttcttcctctgtcctgaagtaattcagtttttattgatggttgaggataagataatctttaaaaaagtttcatccacttctgggcgtgtcatgacaaatgggcttatctgaagcattggtttgacttttttgtttgtttgtttgtttgagatggagtcttggtctgttgctcaggctggagtgcagtggcgcaatctcggctcactgcaacctctgcctcctgggttcaagctattctcctgcctcagcctcctgagtagcttggactgcaggatcaccacacccagctactttttgtatttttagtggagacggggtttcaccatgttggccagggtggtctcaaactcctgacctcaagtgatcacttgcctaaatctcccaaagtgctgggattacaggcgtgagccactgcacccagtctggtttgactttcagtgacacttttacttcttttaagtgcataaagtaaaaaatactaagataaaggacgcaaattaattcctaattaacatatttatagtttggaaaaagtgctagaggtgcttgccagttcaatttaattccatgcccagaatgtggtttctgtttattgaaatgttcttagttttggtcatctgttactacttgctgttgtcttcacggggccctgactggccttggcataactaggctgctaggggaatagttcttagagagtcattttatgtattggattttattctgatttgttttctctctgaaagctggttgttatttgtttttttttttttttttcgatcttaggtggtggttgacacagcacagattgagaataaagaagcctatgccccccagatcagtttagaaggctctagaatcgtggttcaagtcccatccacatggtaacgtgcctcttactttcaccggagcctaagctctgactgacgtttgcacatctttgaaatgatggccttgttttgaacaatgcccatgctagctgacgcaacaagtcttgctgcatgtgcaggtttatgggcagcagtggtatgttagtggcatgtgtcatgattattggtctgtgatgaggaagccaagaggtctgaaaaatggtctcattgaccataatgtaactaaaatgttatatactcttggatcataatgagcagtattatctttgttactgagtctacagcatttaaacatagtatatcattttctctaagtcacccagtgttcactaaagcccagtagagaacatagaattccttctcctctgttccaactacaatcctgatgatcttgagctcatgttgtgacacacccagtgtctttacaaatcttgggacagtcatttttagatattatatttgtaacacttataatagataaaagattattcttaatttatttttttttaaaaaaagctcctacaaatcagaagaaaatgggcaagggacatgaacagctaagtcagaaaagaagacatatgatcaacaaatagattaagaaaatgtaatggccaagtgcggtgactcacacctgtaatcctagcactttgggaggccaaggcgggcagatcgcctgaggtcagaagtttgagaccagcctgcccaatgtggtgaaaccccatctctactaaaaatacaaaaactatccaggcatggtggtgggtgcctgtaattccagctaatcaggaagctgaggcacaagaattgcttgaacccaggaggcggaggttgcagagagctgagattgcactattgcactccagcctgggcaatagagcaaaactatctcaaaaaaaaaaaaaaagaaaaaagaaaatgtataacttcacctaaaaatcagagacaaagtaaagaaaccatatggggccaggtggggtggctcacacctgtaattccagcactttggaaggccgaggcggccagatctcctgaggtcaggagttccagaccagcctggccaacatggtgaaaccctgtctctactaaaagtacaaaaattagccgggcgtggtggcatgcacctataatcccagcttaaggcaggagaaccgcttgagcctgggagacagaggttgcagtgagccgagatcgtgccactgcactccagcctgggtgacagagcgagactccgtctccaagaaaaaaaaaaaaaccgttatgatgtcattttgcccagaatattgttaaattgttttagaataacaatactaaatatagtgacaatactagtttgagccagactgtgaaacaggcaaagaggttgttgagtagagactaaatacaacctttctggagggcaatttagtatattagaagcctaaaataagggatatgacctcaacaattccacagtttcacctctagaaatttatctttgtgatatgtattcacattcagctataaggatgagtatcatagctttattaataaacaggaaaaactaagcatatattggaaggtatttgctattaaaatggtaatctgcatgaatatttagctataagagaaaatatttaaatcatttaagtaggcagagatactaaggaacaaagaggtgctgttggtgcctatgtggactaaaatggtagttgggtaaggcatacaagttgtatttaaaccatttgttcttttttttcgagacagaatctcggtctgtcgcccaggctggagtgcagtggcgcaatctcggctcactgcagcctcttccgcctgggttccagtgattctcctgcctcagcttcctgggtagctgggattacaggcgcatgccactacgcccagctaatttttgtacttttagtagagacagggttttgccatgttggccaggctggtcttgaactcctgacctcaggtgatccacctgcttcggcctcccaaagtgctaggtttacaggcgtgagtcaccgcgcccggctcatttgttcttgaaatgtaagagtataatagtagattctgtcaaaagtgtttagagtctatgaatatatttaagtaaatgttggcagttcactttgtgtcctaaaacctcccttctataagtactctgccaccaaaaagttcttttatttttttaaattattattattattttttttttggtagagacaagatctcatgctgtcccccagactgcagtgcagtggtgtggtcatggcttactgtagccttgaactcctgggctcaagcaatcatcccaccctggcctcccaagtaggcgggactacaggcatgtgccatcatgcctggctaatttttaagttttttgtagagatggagtctcactatattagccaggatggtctgggactcctgggctcaagcgatccccctgccttggcctcccaaagtgctgggattgcaggcgtgagctactgtacctggcccaaaattttaagttaattgtagggtggcatactgtgtcctgaaattaatggtaatttatacacatattttcatttctatcaaacagtaaaccagaggctcactttctgtaagatttttgtgttactaaattctttttttttcttttgtagtcagtgttctgctgaaatgtgttcctgaatttttttttttttttttgagatagtttcgttcttgttgcccacactggagtgcaatggtgttgtctcggctcactgcaacctccacctcctgggttcaaatgattttcctgcctcagcttcctgagtagctgggattacaggcacctgcctgcatgcccagctaataacttttgtgtttttagtagagatgggtttcactatgttggccaggctggtctcaaactcctgacctcgggtaatccacccatcttggcctcccaaagtgctgggattacaggcgtgagccactgcacccaaccctgaattcttaaatttttccaattcaggctgtcattggaaaatgttaaaacttaatcagaattctcattttgaagagtttgaacttttggatagttgggtgaatataaacagtcagtgcaaaaatggctaacacttgagtttgttttgaaaactctccctgtggggttgatttcatttgtaactcattgcacccccgcaaaaaacaccttgtagactgtgatttcttgtagaggtgccctctgctgggtgcttttggtaattttgcaaaattttagttctgtttttttttttttttttcaaattacaaaatactgtatgtgcttgttgggaagaacacaaacagaaatgattgctttactccacctggagaaaaaggatattgctatccatccatgctttgtttcaccaaatatttactgaacacttactgtgtaccagacactgttctgggctctgggaatttaattatgagcaagacacacagggtccctgcccctcataaaccaacttgagaatagagaagggggagacagctgttaagtataagagatgagttcagacacaggcaggcgtatgatggaaatgagaggagagtgccattatatgatagagaataagtaggatagagattcgggggagacttttagacgagtcagtctggaagagggtctgaggatgtgacattggatttgagaggagcctgtcatgcagagagccgatggggaacacacttcaggcagaaagaatgccagtgcagaggcctcaggagtgacccagcatggaaggagatgtgctaggtggtgatgaggatgggaagttgtagacgtcaagacttgcagggcccttgaaggaattgggtttttatctaagaacaggtagagggttttaggcaagtcttggtgatttgtcaacagaatgggtttagccacttaagggcattttattgatcagctcaaggctgatgaataaaataaaaatgccagtttgttgattgttgatttttcagaaagattaattatcatcaccaggagctgtagtactcttttctacatggccaacaaatgctctcctagtgggcaaacatgtgacaagccaagtcacaaccagacttggcttgggaacaagagcaaatgtgtcctgattatcagtgattccagatggagagaattgggtgcactgaaccttgggcaggctcagctgccaagattctctctgaggagtccaaggtctagctgggcactagcagagcttgcgttgttgttcaccctttccaggcttctgagcctggccggctctcatttcattctctgatatatttcttcccaagtcaaagtcatgttagggagtactgctacctccttgagtgactttgtaagtgttgagttcaccatttagcttccagagtgcccaggatctggcagacatcatcttcctagtagacctatgctgctcagactgttttccctctcagaaaagggctcttggccagaccaagtggctcacacccgtaatcctagcactttgggaggctgaggcaggaggatcacctgagctcaggagtttaggaccagcctgggcaacatagcgagaccccatctctacaaaaaaattaaaacattagccaggtgcggtggcacacgcctgtagttccagctacttaggaggctgacatgggaagatcgcttgagcccaggaggtcgaggataacagtgagctttgatcacaccactgcactccagccttgaggatagagtaggactctgtctcgaaaaaaggttggggggctcttggtgtaggtaccctgaatggacggtggagacccaaatgatgagaagcagttggccataccaaaatctcaggaaagagaaattcgggcaaaggcagcagcaagagcaaaggtcctgaggtgtggacaaacccatccagggaggaagagaaggcctcacagctgggacaaggttgaggggctgggcacagagggctttgagggctgtggtgagggtttagattttatttcaatcacgatgatatcccattgaagagttttaagcaggggagtgatgtgctctgattggcactacaggaagctcactctggcccctatatgaaggatgggctttggaggtacaggagtagagaaaaagaggccaggtgagagcttggtcctgagacccaggagtggtggtttcctgaagcagggggttcataaacaaggtggcgagaagtgcttagattctggatgtgttttataagaagagctgtcaggattcactgatggattgcatgcaagatgtgagggaactagagagggtgtgtaagttttggggtagacagttgtgttgttcacttattggagaagtcggcaggaatcagagtgtctgagctagcacagaccgcacaggttaagggctcagccccacaaggctactccccacttcagatgccatccacaagtcccaggttgtcacccgacttctaaccaatcggctataagttgggggttcccaaaacctccaggtttgatattttgctataatggctcacagaactcagtaaaacatttaattatatttaaggtttattataaaggatattatagcagatacagattaacagccaggtgaagaggtgcatagcgtgaagtgtttgggatggggctccaagcctccatgcccttgccagctatgccctgtgcccagcaccttagtgtgttcaccagcgtggaagctctcagaacccgatggtctgatgatttttatggaggcttcatcatataagcaagtcatcttattagaacaaaagacactatcacctaggaaatctcaagggttttaggagctctgtatcaggaactggaggcagagaccaaatatatattctgatatcatgagacctcagacctttttgcttcctactcctcttgtggggcagtgagttccaggatcagccctgttgttctctccatgttcttacagttactgaatttttgctgggcgccagaggtacataaaagttgtagccttttctatgagacctgcttgagacacctttgcagagaaatgcagccaagactaatgcagcctaatctatgcctaggtgcctgaaagaagaccctgctaccatgtccctgctgcagagaagccttgatcctgagaagaccctgggtctagtggacgtgctctacacagctgtgctggacctaaaccgctggagggctggaaggttggtgtctgtggtttgcattagatgcataccgagggacagtgtgactatgcacagtttcatgtgtgcttgtgtcattgatagtatacggtattgtaaagaaggcagtaaggactttttagtaacttttattttcagaataatttaaaacctgcagcaaagtggcaagaataatacaaagaactgctccatgccctgtaccagattcccctatttgctaacttttttgccttcctttattttgtcatttgagaggaagtccatcaagaggacttttaactcaactcatattctccttatgaattaagaacagagaaatgtttagaaaatttgcttatgtcttttagaattttttttctttttcaatcagttctctcaggttgaacttgagaaatgtgtatacatctggtagtggccttaaacatctagccatggcccctctccctttttcttttcttttcttttcttttcttttcttttctgtcttggtctttgtctttggtcttgtcatcttgtctttttaggatctggctctgttgcccagccaggctggagtgtagtggtacaatctcagctcactgcaatattgctctccatccatgctatccatcccatccatcccccagctcctgggctcaagtcatcctcctacctcagccttccgagtagctgggattacaggtgtacgcccagctaatttttgtatttttcatgaagatggggtttcgctgtgttggccaggctggtatcaaactcctgacctcaagtgcctgcctcggcctcccaaagtgctgggattacaggcgtgagccaccatgcccaaccttttctccctttcttaactcatgagtacacaaaggccagaatagtgaagtgacttttccagggtcacacagccttcacctgcctcagctcctgccccatgccctttcgctctttagggctccattttagtatgggaaaaatgtgctcaggaaactttgaaagtcacagccatctgttgggacaacgttggcacatagtatccctgcatccccccaccacctccctctgctttgtggagttgtccattgtccctctgctgcatttgcgtggctgtagcccctgtcctccaggcacaaatctagcttctgcaagttgcatccccacatctagccatgctttcccctcctgtgccaccattagaggatttcactgaatcacactcctcaggccagaatcctagcagaacttccagtcctgcgttagacactgtagatttcatactctccaaacccctgggtgttcatttatatataaaataagtgaacccgataccaacctgagaggtttttcttgctctcaacgccattcttaaatacaaagaggtccattttattattttatatatttgtcttttttttttttaaacaaatttctgtttaaatagggagcaagctttaccctgcatacagatccagctgcaaagggagatctgtgattttggcaaccaggctgacctgccttctggaaatggaaacaaatcttcaggtggcctgcagaagacattctccaaactgacatcccggttcaccaagaaagcttcatgtaccagctccagcagcagcacaaattattccatccaaaataccccttccaaaaacatcttcatagctggatgttccgaagagaaggccaaaatgcctggcaatattgatacaaggttacaaagcattttgaacattggtaatttccccaggactacagacccttcacagtcagctcagaattccagtaatacagtggccaatggctttctcatggagaggcgtgagaacttcctgcatggagatgacggcaaggatgagaagggtatgaacttaccaactgatcaggaaatgcaagaggtgatagattttctctcgggctttaacatgggccagtcacatcagggctctccgttggtgacaaggcataattctgctgccacagccatggtgactgagcagaaggcaggagccatgcaaccacagcagccgtcactgcctgtgccccctccaccacgggcaccccaggctggggcacacacacctctgacaccccagccgggactggcacctcagcagcagtccccaaagcagcaacaacctcaagtccaatactaccaacacctactccagcccattggaccgcagcagcccccgccccagcctcgggcacctgggaaatgggtacatggctcatcccagcagccagcgcaggctgttggagcaggtctgtctcctcttggtcagtggcctggcatatctgatctcagttctgacttgtacagcttgggtctggtgagcagctatatggataatgtgatgtcagaggttctgggacagaagccgcagggacctagaaataacacctggcccaaccgtgaccaaagtgatggagtctttggaatgctgggagagattctgccttttgatcctgcaggtatgtgaggcctcccatccctcgcccagtgtcaacagcaaatgcaactgccgaggtcttcccagggcctgtctgctgcagccttacttgtgaaggtgaaatcatttaatccccctttacgaccctttctcactgtggaggcaagtatggggcagatctaccaagatgggaaacagtggtgagaaaggggctgagaacatgagtggactatttttcttactttatagagaacagaactgaggctaagagaggttacttgaacagctcaaagtcccatagttcaagtaggctccagtctaggcctgcctactcccggcagccaaggtcagcagccctttgtggggtgcttttttcctgattatataacctgttctttgcgatgctttttttttttgcctaaactctaggacctatgacaggtgacagacaccctcctgccttcatagaatacagcttctcctgggctagacaatgaaaataccaccagagtcatcttaaaaaattagagaaggaatttacaaacaagaacaaactaggaggaggaattaagggggaaaagccaaaaataagtaaattagaaagaaaaatagagtagaaattgcaaataactctaaaggatctttggaagaccaataaaatgtataagccaatttattctaagcttgattaagggagaacaaagagaaacaaaattaggaaatagaaaggatacattaaaagcgctttagtggctcatgcctgtaatcccagtactttgagaggctaaggctggaggatcacttgaggccaggagttcgagaccagcctggtcaacatcacaaaaccctcatctctactaaaaattaaacaaaattagctgggtgtggtggtgcttaggaagctgaggcggtaggatcccttgaccccaggattttgaggctgcagtgagctatgatcatgccactacaccccagcctggctgacagagagaaaccctgtctcaaaaaaaagccactttaagacagtaccatctaagacttaatagcaatacatttggaaattcagcagaaaatggattctttcctagcaaaataggcattacaaaattataccaagaagtggaaaacctggccaggcatgatgtctcatgcctgtaatttccagcactttggaaggctgaggtaggcagattgcctgaggccaggagttcaagaccagtttggccaacatagtgaaacccccatctctacaaaaaataaaaaattagctgggtgtggtggcacatgcctgtagtcccagctccttgggaggctgaggtgggaagatcgcttgagctcaggaggttgaggctgcagtgagccatgatcacaccacagcagcccagcctgggcaacaaagtaagactctgtctctaaaaaataagtaaatacataaaaaataaaaaagactatctactaaaagctaatagcaaatagtgccttatataatgaaacaaaaatcatttcagttaatatcaggaatcagacaagggcgactgttatcacctgtagcatgtaactttgtcttggacttcacagcaaatgcagcaagacaaaaagcaataaaataagtggtctaagctttggaaaatgataaattaagcagcacatctttttgctgataatagaattgaaccccccccacaaaaaaaaccatctaaaattagtaagagaatttggtaacataggtacatgcaaacttttttctctaatttagcaaaaggcatacacagaagtagaaaatgtatttcattcacaggggagtactgtgaaatgttacaaataagtatagcaaatacttgtacaagtaaatcaccaccataagaggacactccaggccgggcgctgtggctcacgcctgtaatcccagcactttgggaggccgaggcgggcggatcacgaggtcaggagatcgagaccatcccggctaaaacggtgaaaccccgtctctactaaaaatacaaaaaaattagccgggcgtagtggcgggcgcctgtagtcccagctacttgggaggctgaggcaggagaatggcgtgaacccgggaggcggagcttgcagtgagccgagatcccgccactgcactccagcctgggcgacagagcgagactccgtctcaaaaaaaaaaaaaaaagaggacactccttgctgaaacacccagcatttgttacaggagggaagttaatgctggggttaacactcctttctctttttttttgagacagagtctcacgttgttgcccaggctggagcgcagtggcgcgatccccacttacttgcaacctctgcctcctgggctcaaatgattctcctgcctcagcttcctgagtagctgggactacaggtgcctgccaccacacccagctaatttttttttttttttatacggagtctcgctctaccgccccgaggctggagtgcagtggcgcgatctcggctcaccgcaagctccgcctcccgagttcacgccattctcctgcctcagcctcctgagtagctaggactacaggcgcacgctaccatgcccaactaattttttgtatttttcatagagacggggtttcactgtgttaggcaggatggtctctatctcctgacctcgtgatccgcccacctcggcctcccaaagtgctgggattacaggcatgagccaccgcgcccatagagatggggttttgccatgttggccaggctggtcttgacctcctgacctcaggtgatccacccacctcagcctcctaaagtgctgggattacaggcatgagccactgcatctgaccattgctcatgtcttctgaaaattcttcatgccgctgctcttgctgttttgtgcttgctccccttgggtggatggatgtaggaaacccttgtgcctgcaaccctgggccacaagaagggtaaacacctccatcctgctaagaaacagcaagcccactggctgccacccactggtgtgggcacagtgcgttttctcagttgatcatagatggtgtgtacattttttgactgtcatataactaaatccagagtataaacagtatttgtcagaattgtgtcatatttgaggccgggtgcagtggctcatgcctgtagtctcagcactttgagaggctgaggccagcggattgcttgaggccaggagttcaagaccagcctggccaacatggcgaaaccccgtctctaccaaaaatacaaaaaaattagccaggtgtggtggcacacacctgtagtcccaaccacttgggaggctgaggcacgagaattacttgaacccaggaggcagaggttgcagtgagctgagatcacgccactgcactccggcttggataacagagtgagactttgtctaaaaaaagatttatttttaataaatgaataagaatgttatcatatttgacctctgagtcctggatacctcttctgtctgtagactacaaatcctactctttcccttctgggtgttcctttctgcacctgaagtccatggtgtagttttctacagaccttgccccgagggcataagatctgcatagcccttgatgcagattaaggaggggcacccctctggacagaatcagagggcgccatctagtggccccgtctagataggcaaaatcagtgcgggatggggaacgggagacaggccagcatgactgaaatcatcttgtgacagtgccctaaggataagttgataatgggattgtgccctagtatcttccctaattttaagctaaaaaatgcattgctgagtcacatttgatttatgatgcatggatgctttcctgccatatgttttttttgacactttctgtaaacgccatctgtgcttttctcccatttgtactgccctgtatatccccgttcagcattgccagtgtttccagccacctcttaaagcattctgaagtttcattttattctttgccacacttaagatgttcagatggaatgagcaaatctcctgtcaatagccaggaaaatactagatcaaactttagcttaagtgggatcagcatataacctctatctggctgaccccaatgctttgatgctttgttaacgttcaggttatcagttggccaaagtcatcatctgattttcgaagttgttagctaatgactctaggctacatacagagcaccaagacaatggactttttttgagttggagttttgctcttgtcacccaggccggagtgcaatagcgcgatcttggctccctgcaacctccgcctcccaggttcaagtgattctcctgtctcagcctcctgagtagcttggattacaggtgcctgccactacgtccagctaatttttggtatttttagtagagacggggtttcaccatgttggcctggctggtctcgaactcctgacctcaggtaatccacctgccttggcctcccaaagtgctgggattacaggtgtgagccaccaagcccagcccagttttgttttgttttgtttttaaagacagggtctagctctgtctctcaggctggagtgcagtggcgcaatcttggctcactgcaacctccacttcctgggcccaagtgatccccccacctcagcctcccaagtagctgtgactacgggtgcacaccaccacacccaactaattttttttttttttttgagacagagtctcactctttcgcccagactggagtgcagtggcacgatctcagctcactgcgacctctgccgcctgggttcaagtgattgtcctgcctcagcttcccgagtagctgggattacaggcgcctgccaccgaacccagctaatttttgtatttttagtagtggtgacagggtttcaccatcttggtcagactggtcttgaactcttgacctcgtgatccacccacctcagcctcccaaagtgctgggattacaggcgtgagccaccgcgcctggcccacacccagctaatttttgtagagatgaggttttgccgtgttggccaggctagtctcgaacttctgggctcaagcgatctgcccacctcaggctcccaaaatgctaggattacaggagtgagccactgtgcctggctgatgctggaaattttttaagtaattagtatttgtctttaaaatctagtcgtagggaaatcaaaccatttttctctctttttgtttctttcacacttagcctgcctctatcctaggcatagcccttcatgacagccctggcacacaccatgcctcagccctaggtgcggcaagtcccatctccccacagcagggtgctgggcacagcctacagcccacgctgtggggcacaagcctggcagctcctcactgcctttcattgcatgtgtgaccagcacgttagcaaagcgtagggaaggaccaagaggccagtttgtccccaaacccggtttattcctttgtcccaatgcagtgggctcagacccagagtttgcacgctatgtggcaggagtgagccaggcgatgcagcagaagcggcaggcccagcacggtcgccggccaggcaacccccggggcaactggccgcctatggatgacgcgcatcggacctggcccttccccgagttcttcacagaagggtgagtgctgggtacttcagggaatctgagcttgagacccaggtgtcccccgaggggcctgtgagaagagaggctccttgcctgtgtgcattcttttcaggcagttcaattccaagcccccatgtgagagagtgacatgggatgaaatctttaggggtcagagtcatgtggctgactgttagatgccaagtagtgtgatgtatccctgtgaacgtgccattggtatacattcatgattttcaaaacagactcttcagccctagacaaggctcttacatgatggtgcttgtgaggtgaaggcatgtttcacacggcctttatactgaactgagtgtggctgcgaagcccacgtgatttatggaacgctgtcattatagcctatgaaaagcaaaagtgtacaattgagattctagtatattgagagaattgcaaatttttattgtaaagacaactggggatttttttatatcccatattgctacatggttaataaatctggatgactaaagaccagctcaactttttgttttttcttatttttaaatttttttttttacttaaaaattttttttctttcaacttttaagttcaggggtacatgtgcaggatgtgcaggtttgttgcaaaggttaatgtgtgccatggtggtttgctgcacagatcatcccgtcacctaggtattaagcccagcatccattagctattcttccccatgctctccctcccttgctttttctaaaacaaatttcatatacaaaccataggcttcttagaggaataaagggaattgatgaatatgtattacttttgaaataaggcaaaggaggaaaacctcacgttttaagaagggagagacaagagaccactatttggttatgggatgaatgcagggtaaggactgccctttcagggtggggtggcgggtggtggggctgcaggaggccctggcccagcttctctctctggctttcagggatggcctgcacggtggctggtcgggtgctcagggagactctgccagctcgagtgatgagacatcctcagccaacggggacagcttgttctccatgttttcagggcctgacctcgttgctgctgtcaagcagagaaggtatgaagggatttctaaaccaaggtggggagagaagggcatgtgaatgcaacccatggctcactccctgggaaagccaggagcccagtcacctccagtctccctgtgtgagaggaggggctcttccagcaatgcctggctgaagcctctgaagagcacctgcaggaggcggtttccacaaggaagagccggcctcatcttgtgcagatcaatttgggagacggggtggccggtgctggtctgtgccttgcaggaggcacccatttctgtgggaagagcaggcctttggttgcgagttctaatctggactcaccaacaggctctgcaaccctagacaaggggctggccctcaattaccctccatctctttattaaagatggataaaatgacctctgaatggcgtttcaaagttgggaaaagtagtaattagctttcaaaagtagtcacaaaaattaaaatgggctctgaactgagaggagagcttggttagaaataagtagagaaactgctgtggatatgagaaagcaaggtcagggtggcagactaaggaccatgggcaggagtagagggcacgcagggctcccaggcactcgaagccatgctgtagagcagagtgggaggccgggttacttggtccctgctggacaggccaggctctgtcagataggcagtggggagcgggtaggtgaagacagaatggtacttgcacagaatagtagtggggtggggggtggcattgaccaatcacgagcacacattcagatgctttctgtccacacttgtagtcccagctactcgggaggctgaggtgggaggatcacttgagcctgggaagttgaggctacagtgagctgtgtttgtgccactgcactctagcctgggcaacagagttagaccctgtctcaaaaatcaaacaaaaaatcatgtcaggttaggctaggtgctctgaaggaaaataaagcagggtatgagggtagtaaatgcagagaacaggtggatgttctatttccagcacttagtcaatgaggcttctgatgagcagagagctgaacaaagtgcggcagcaactggtggggaatcggcagtggggtgtgggtgaggtaggaagagtcaaggatgacacgcaagttttctgcctgagtttctgtgaagggcgccatgaactgaggtgctaagcctgcaggaggagcaagtttgaaccgggggtggagtttgagacttttctttcagacatatgactgattcgacttctaagaagtcacatctggcaccatctctgcagagactgttgtctgcatgcaggagtgctggctctgatctggccacatcctgcctttttcattcaaccttgtaacagactttcatgtgattagtaaaacgaatgggctttaagtcacatatccttagtgcttggaaacagtatctctctctttttttgtttttttgagacggagtctcgctctgttgcccaggctggagtgcagtggcgcggtcttagctcactgcaagctccgccttccgggttcacgccattctcctgcctcagcctcccaagtagctgggactacaggcgcccaccaccatgcccggctaattttttgtatttttagtagagacagggtttcaccatgttagccaggatggtcttgatctcctgacctcgtgatccacctacctcggcctcccaaagtgttgggattaaaggcgtgagccaccgcacccggccggaaacagtatctcttaaataaattaacaaaaagccggccggactcggtggctcacacctgcaatcccagtactttgggaggcttaggcgggcagatcacctgaggtcaggagttcgagatcagcctggccaacatggtgaaaccccatctctactaaaaatacaaaaattagctgggcatggtggcacgcacctgtaatcccagctactcgggacgctgaggcacaagaattgcttgaacctgggatgcagagtttgcaatgagctgagatcatgccactgcactccagcctgggaaacagtgagactcagtctcaaaaaaaaaaaaaaaaataaaataataataataataataataaagccaaagaaggtggactcagcagctgagtaaaccagtgcctgtctttgcctgccacctccacccccagctcctccacctgcactggcagtgcaggagcgccgtcattcactgctggctccccttagccgcctttatgccattgacccaggcaggcctcctcccctcctagaaccagggcctggagatgctggagcctagcactagtgtgtaccctacaggtgggctgggcaggaagccaagcaatcactgccctgagctcttggttcttgcaggaaacacagcagtggagagcaagacaccagcacgctgccctcaccacctctcctcaccacggtggaggatgtgaaccaggtattcaggcaggctctgtgggcacagacttgggctagcttccacagctgcagttttcagagggcctcaaagtaatgagggatcttctttgtggtgattaattttgtgtaaatgattagccacctcagctgactcagagccacaggaagctctacggctgtgctgtccagtgtgatagccattcaccacatgtggctatgtaaatttaaatacaaataaaaattcaggccgggtgtggtggctgatgcctgtaatcccagtgctttgggaggccaaggcagaaggatggcttgaggccaggagttcttgaccagcccaggtaatatagacactgtctctgcaaaaaaattaaaagatcagctaggcatggtggcacatgcctgtagtcctagctgcccaggaggctgaggcaggaggatggcttgaacccaggaatttgagattacagtaagctatgattgcaccattgcactccagcctgggtgacagagcgagactgcctctaaaatactttttaaaaacaatcagccgggcgcagtggcgacgcctgtaatcccagcactttgggaggccaaggcgggtggatcacgaacgaggtcaggagatcgagactatcctggctaacacggtgaaatcccatctctactaaaaatacaaaaattagccaggcatggtggcatgcgcttgtaatccgagctactcagaaggctgagacaggagaatcgcttgaaccccggaggcagaggttgcagtgagccgagatcgtaccactgcactccagcctgggcgagagacagactgcatctcaaaaaaaaaaaaaaaaagttcctttcctcagtttgcactagtcacatgtggcgagtggctaccatactagaccgtataggcacagaacatggctatcattgcaagaagttctgttggacaggggtgtgggagtgagtggggctctcacccggcttcctaggagggaataagggccaggcatctggggaggtgggaaatgatgatacattgcccgaaatgccactaagaactctcttttgtttctcaggataacaaaaccaaaacgtggccacccaaagcaccctggcagcacccttccccgcttcccagcacgctgcccagccccagcgcaccactctatgcagtcaccagccctggcagccagtggaacgacaccatgcagatgctgcagtccccagtgtgggccgcaaccaacgactgcagtgccgctgccttctcctatgtgcagaccccaccccagcccccacccccaccagcacacaaggcagcacccaagggcttcaaggccttccctgggaagggtgagcgcaggccagcctatctgccccagtactgaccccaggccagccagcctgcctgcctgcctgcctgcccgcccagagctgtggggatgagtgtccccaccccagggccacttagctgacaccagcccctcagaggaccagtgcgccccatcccagggagggttccttggggacaagggtggttggcagctccaagcctttaaacctggcttctgaaacgatggcatcagagccctggagagccagctggagacacaggcgtctggccttcaggggcttgctagggaacctgcatgcctagtaagcgccacaggtgactctgatgcaggcgccacagccacacttgaagaaacacagctcttgggtttttagtcctgctgtgtgttgggaagacatcaggcctgaaagctgagggcataactgaccattttttggaaaccctctcctccctcctccacaccttgagtgatgaccacaccaatcactgtattttatagctttttttttcatgtaggtttttagttaaaacatctcctgcctaaaatgcattgaatattttaagataacagatatactggctggaggtttgtttaacactatctatatttaagcttatacaaaatgggcaaaatatagaatatttgtgattggaagcagtcacctggggtttctgggggtggacagttcctcgccacccagcagcaccctgggactgcggcctttcccagctttattgaagcagaatggtggaacttgtgccggaggtacactgctgaaggtgcgtggcggtggaccagccagctgctgtccatgtgcagagcaaggctgcacctgctgcccttcgatccttccacacatggccaggacactgccacaatcctcggggtgtggtcaaggggcactcagagacacctgcactagaaattgcattgacattgtgagctggctcagaagacaaaccaattaagatgtagatagaaattaatttaaggtcttttcttaaaaaaaaaatccacctcattttcagttaacatgtgccattaaatagataacatcctgtggatttagggatattttccagccagaatggatccagaagaattgaatggtgcttaaattgagaaataataataaatatatctatatagaatagacatatcccactgtatattaattgaggttacagaaagttctttatataaaacttatttaaatttttcatatttcatctttgaaaaagtctgagaaaaatccataatattttctggtatgaaagtttgacagtattaatattttttttatattttcttaaatcattaaaccattttaatatatgttaactactaataaatggtttattctttctaactccatataagcttttccagcaaagattgtaataacacatttatgttctcgtttttctacagatataagtaaatttatatataaaaataccaaaaagaggctgggcgtggtggctcacgcctgtaatcccagcactttgggaggccgaggcaggtggatcacctaaggtcaggagttcgagaccagcctggccaatatggtgaaaccccatctctactaaaaatacaaaaattagccgggtgtggtggcgtgcgcctgtagtcccagctactcgggaggctgaagcagaagaatcgcttgaacccgggaggcggaggttacagtgagctgagattgtgccactgcactccagcctgggtgacagagtgagattccgtctcaacaagaaaaaaaaaaaagaatatatatatatgtatgtatgtatgtatgtaaacacacacactaatttgagaggacccgtagggtgtctgagcccagccacctgagtttttagtactgtgttgtcaggctcttcccaggcctcaggtgttgtcttttgtgctgtgtggggatgcattgctgcctgtatttatgatcttttgccgtggttctgagcattcacctcaccatgtttacaaagaactgttttgtatatagacattttcaggcacgtgctttgcaccaaccctgcgtggctcttgtctgtgttagctgtcacggtgtgcacactaatctctgttaaagttgtctatggctgttctacttgtaagatagttttctatttccttcagtaatgtgtccacagtaccctgtatttcgagttccattatactgaagtactcatgttttaatagtgcctctccaaaggcctcaccttggacagaggtcaatccttgatgctccagcacaggtgacgtcactaattgtcactttccagtttgtttttctctattaaggaagacattttctaattgcatctccatgggctgtgagactgtgtgaagccgtttgtgtggtctccatgtaggtgctgtgttcccggcaccgccttgctctgaacactggtaattccaggtgctgcgcttggcagaggggtctcgccaaagcgcatgtgtgtgcatgtgtgaacgtgtgtgtcctttgcatggttgggcgtgggtgccttgctagggcatcagcaggacattgtgtgtatagttacaatgcttccaaactggaactctacattttgtatcttttaaagctcctataagtaaaataactattggctttattaaaaatatacatttaataatactttgtatccttgtttaaaatgaactgcagaggacattatgtcaaaagccctgcctgactcattgctttgaaaagctgcatactgagttggtttttaggtcagcctgtcctctgattctagcaaggggaagaccacttgggatattacggtgagctgaagtggatgggcaggagggagaacaagcagctacgcctcccctattggcttccctaaggcccaagctggtttaggcccctgtgcagggggagccagtgcagtagtgaaggagacgtcctctgcaagggtgcaagctctctgggttggggtctaccaacacccatgttccaccaaatgtggatgctgtgacttgcccagccagcttgtccaatgacgagacccaagaatgagggcttgttttaccctcttcccaaaccagggacccaatctatggcagagatactgtgccttacagggataagaaggacctgtctctgccggccgcagtggctcacacctgtaatcccagaactgtaggtggctgaggcaggtggaccacaaggccgggagatcgagaccatcctggccaacatggtgaaaccccatctctactaagaatacaaaaattagtcgggcatggtggcgtgtgcctgtaatcccagctactcaggaggcttaggcagaagaatcgcttgaaccaggaagtcagaggttgcagtgagccgagatcgcaccactgcactccagcctggcgacagaacgatggggctgtctccaaaaaaaaaaaaaagccaggcactgtggctcacgcctataatcccaccactttgagaggctgagacagtagatcatgaggtcaggagttcaagaccagcctgcccaacatggcgaaaccccatctctactaaaaatacaaaaaattaggtggtatggtcgcaggtacctgtaatcccagctgcttggaaggctgaggcaggagaactgcttgcacccgggaggcagaggttgcagtgagccaagactgctccactgcactccagcctgggcaacagagtgagactctgtctcaaaaaagaaaaagaaaaaaagaaaaaaacaaaaacaggacctgtctcactggatgatgccatcgtgttaagcagaagaaagatagtatcatgagacccacaaatggagggcaggtcacaggagcatttcagctcattttcatttacagaaagacagcacctcagtggaaccttttttgacgacctgaagaaaatggagtaatgtgggcattaatatataagctgctggtgtaggaaccactcttctttctgccaaggtgccctgaagttgagcatggggaccaagtcccagagccttccaaatgcacctcaggacaaagttgctcggtaacggccatgttgcctgagagtgctcaagaatacactggaagttcatattaaaaagctagcaggggctgggtgtgctggctcacgcctgtaatcccagcaatttgggaggctgacctgggaggattgcttgaggccaggagttcaagaccagcctgggcaacatagtgagaccccatctctttaaaaaagcccatattttattccagagtgttcccatttaacacaagcacccagttctcttgactagttctgattcacagcagtgctggaggccagagggcagaagtcccgcagctctggctgtgtgcaaatgagtggggagggaagctgagcagatgctacacctgagctactactgcaagggcttcacaggccttggcccatctgagaaatgggggaggatgcgcaggcatcttgaggtacttgggaggcttgtgaccttcctctcccacctgggggctccttggatagggggcttccagtttggaggctgagatgctgcatgccaaccatgcggctgtgaggggatggccttttgtgcactgtgtggccactgctgtgacctgcctcctgttgtggagacaggaaataaaccttcccaatgatcagcttctctactgcccaaaagcatgtatgtggacagcatgactggctacctcccagcgacaggtacccaggagtctgaggcacctccaagggtagactctggaaataacacatgcacctagccttacagcacaggggtgagctcctgggcccaggcctgtgtgtgtcagtgaggggactggatgtggcttgtactggaatattgacttggagatgtgggcctaggtgagggagaaggattgtttcaggcgtgtcacattcatttcaacattcacgaatgtcatataagggctaggcccttgctaggagccaggactgcaaagatacagtccctgcctttaaaactcagtattttaggggagacaacccatctttcccatccttgataagagaaccaccatccaccagcaacccagttgctcaggctgaaatcccagaagatattcttcgttcttttatttcctcattcaactaatcagcaagtcctataagtgtattcccaagcacactcaaattccaccatgttctggccaggcgcggtggctcacgcctgtaatcccagcactttgggaagctgaggcgggcggatcacccgcggtcaggagttcgagactagcctgaccaacatggtgaaaacccatctctactaaaaaatacaaaaattagctgggcatggtggcaggtgcctataatcccagagaatcgcttgaacctgggaggcggaagttgcagtgagttgagatctcaccattgcactccaccctgggggacagagcaagactccgtctcaaaaacaaaaaaattccaccatgttcttacatctccactgccatctacctggacttcacctggctcctgcctctccccccacagcctcagggtttcccatgcaccctcccctacttccaagtagccttgccgtgtgtcctccaacttgcctgttgctcccaaggctgcttgggcctctccatcggttttctggggtcagagcccatcttccagcctgtcttcgtttctcatgatagcactcagcactcttctggaattttgtgtttgcatttgtgtctcactggaatgaaggccccatgagagcaaggagcgagtcttgttcatggccacatgtgcaaggtgcaggacagctcctgtgaccaccacagtgcaacttgagacagatgaaaggacgagttgctggggccagaacttacgaattctaatactgagcaaaaagacagaactagaggccgggtgcggtggctcacgcctgtaatcccagcactgtgggaggatcacttgagcccaggagttcaaggctgcagtgagtcgagatcttgacactgcactccagcctgggtaatatagcgagactgtctctaaaaacgaaaaacaaaaacaaccagacgaaaacattctcgcgttgggctaaaagaatactattaaatacatcatctgggctgttccaggactgggaggggattagcactacggtggagctgcggataggcccaagcaggcctcaaataaatgtaaagctttttattctcgtggaaacagctatgtacaatggggaaaatgtttttaagcatctagcaaaggattcacggggctctggtaatgaagccccgaaacgacaagactggatcgcgcagggtagggccaacaccagggacaaacccccggcctcttgggggcgcggtgagtaggtggcctctccaagcaccactcccgatgtgcgcatgagcgcagccgcccctacgcagcgcgtgcgcacgtgcactcaccacgtccatcccagacgtgcggacccgggtgtctgcaaggttcagtctccacaccccagcgcccgaccctgcgcggggacatgcgcacaagcgcgcgtcctgaccacccggacgtgctggcccacacgcacacgcgtgcgcattacccccgccccatccgcgcctgcgctcaaccccgcctacacctgctccgtggcctccccggaggcgatgagccaaccccggtagctccagaggcgtggtcccctcgccttcgccggtcaacatgactcagcatcctcggtgggctcgcctcctcccccggaacagctgtctaaaatccatgggcgtggaaacgccacgccacgccccgctcccgacttcttcagctcaggccccagaactgaccaccccaccagtcctctgccccagtccctctgccttcactcccatggccacctgtgctccagggcctgcctgacccctgtccagcggccctgaagtaaggtctgtgatgtctaaatgccgatacctcagtttccccatctttagaacggggctcttgtttggaactgtgcccgccacagcctgcagtaagtgctagcttcatcaatactcagtggcagtcaattgcttttccagggctgccttatgcttgaaattaaatctttgctatccagagttaggactgtccccggacttcctaacttgcctctgctgtcaggtgtaccctctggtccgctcctctctcagggccacatcatcttgctgggggcacgtgaaggtgtccggctctgcagcatgttctcttggaatttctgggctaggtttcctttcgattctccttggtcagtccctggcctgggggcatgacccctcccagcttcactaccccccaggatcctggggattctgagccctaagctctgcgatcggcaggacttggctcagcatatggtagtgattgtactgatggtgatagacaacagaatataaaatgaccttatggccaggcacagtgacgcatacctgtaatcccaacagtttgggaggctgaggcaggaagatctcttgaagccaggaatttgagaccagcctgggcaacacagtgcaactcagtctctacaaataataataataagaaaattagccgggacggggtggtcatgcctgtagttctagctactcaggagaccgaggtgagagaatcgcttgagcccagagttcaaggctgcagtgagctatggtcatgccaccgcactccagcctgggtgacagagcgagacactgtttcaactaataagacataactgggatgatgaggagtggagaaagggattgcctgctcctccactttccctccacctttttcctaggactgaagaggaactggcaggagcacaggtctcaggaaggaaccaggcagcctgggttgattctctagttaagagcagagtggcttgtttcatatttctttctttctatttttttggagacagggtgtcactctgtgacccaggccggagtgcagtggcatgatcttggctcgctgcaacctctgccacccgggttcaagtgattctcctgcctcagcctccccagtaactgggattacaggtgtccgccaccacgcctggctaatttttgtaattttagtagagacagggtttcaccatggtggccagactggtctcaaactcctggcttcaagtgatccacctgcctcggcctcccaaagtgttgggattacaggtgtgagtcactgcacccggccttgtttcacatttctttctttcctttttttttgagacagagtctcgctctgtcgcccaggctggagtgcagtggcatgattcagctcactgtaagctctgcctcctgggttcactccattctcttgcctcagcctctcaagtagctgggattacaggtgcccgccaccacgtccagctaatttttttgtatttttagtagagacgggggtttcaccatgttgctcaggctggtctcgaactcctgaactcgtgatccacccacctcagcctccaaaagtactgggattacaggcgtgagccaccgtgcccggcctcatttcacatttcttaacctctctgttaaatggggaggacaacagggtatccttcataggactgccatgagggatacatggaaaggatttagcatggagctgtgcacgtagtaaacctggctggagtagtggccgtgttggtagttttgtagtatgatgatgaatggctttggattagtactttctaatccaaaatggctttggattagacttttcttcttacttttctgtgctttctccctgtagccactgtgatttatggcccaccagataggaacctagtttcctgctaacatagaaaatccaggctgggcgcggtgttgcatgcctgtaatcccagcactttgggaagccgaggtgggtggattaccttaggtcaggagttcgagactaccctggccaacatggtgaaaccccatctctactaaaaatacaaaaattaggccgggtgcagtggctcacgcctgtaatcccagcactttgggaggctgaggcagacggatcacgaggtcaggagatcgagaccatcctggtcaacacagtgaaaccccaactctactaaaaatacaaaaattagctggacgtagtgttgcatgcctgtaatctcagctactcgggaggctgaagcaggagaattgcttgaaccagggagtcggaggttgcagtgagccgagatggtgccactgcactctggcctggtgatagagggagactccatctcaaaaaaaaaaaaaaaaaaaaaaaattagcctggtgaggtggcgggtgcctgtaaccccagctactagggaggctgaggcaagagaattgcttgaacctgggaggtggaggttgcagggaagcagaggttgcagtgagccaacatcgtgccattgcactctagcctgggcaacaagagtgaaacttcatctcaaaaaaaaagaagaaaaaaagaaaatccatgtaactggagtttcaaagtaaatgtgaaatctggaatagttgaagcttctgggaatcacagaggccaagttgcagaggtgtacattatggaagattaaaaggcaggggaaacctttgaaatggcaatcatcagaggcctcacctcctgcctctttcgcaatacccaaagctgtttctagggttcctggtggtcgggagaggacactggacaagactgtggcagtggaaaggtgaacacccgtaacatctttggaaagacttggagttgtgaatgacaactgaactccaaacagacactaaagggaatcgttggtttacattctagctgcaggtagaggtggcctggccccaggaacctgggcactgtgagattcactctgacatctctgtggggatcattctcttcgttattttcctcaagaccaggggctagagctcaggtctgtcctttctgacaggcagcttaacaccataaaaagcagagactttctgctgctggctgcagggccctggaaaaggaccctgtttagctggcataagttatgtgctcatctctgatggattcaggcaggggtagaaacacgggtgggagaggatggttttagacaaagaacaacagccgtccatctggtcaccaaaataacctactagaaaaaggcagtctcagtttgcaggtgcagtgctgcatgcctgtaatcccagcactttgggaagccaaggcaggcagatcacttgcacccaaggattcgagactagcctgagcaacatgatgaaacctcgtctgtacaaaaaataacaaagcttgtctctacaaggaaaaaattagctgggcatggtggtgcacacctgtagtcctggctactcagaagggtgagttgaaaagatcgcttgagcctgggaggcagaggctgtagtgagacaagatcgtgtcactgcactccaacctgggtgtgacagagtgagaccctgtctcaaaaaaaaaaaaagaaggaggagtcagagggagtcagtggttactattgggctagagtcatctgaggaatcacagggtaagtgataatggggcagtggctactgagactcgccttcccattggttgaggttttgttctgaaacagaggatttggggtgggaattctcttctgtgtagatgagtaactggcttagaaaaccctgattggagtgtttctcagaacccccgtagaggccaggcgcagtggctcatgcctgtaatcccagcactttgggaggctgaggcaggcggataatgaggtcaagagattgagaccatcctggccaacatggtgaaactccatctctactaaaaatacaaaaattagttgggtgtggtggcgtgcgcctgtagtcccagctactcaggaggctgaggcaggagaatcgcttgaaccagggaggtggaggttgcagtgagctgagatcacgccactgcactccagcctggtgacagagcgagactccatctcaaacaaacaaacaaacaaaaaaagaactccagtagaacagatactgttcagcactaccagggttgtgctaggtgtggaagctcagtgaaatcttaagagttgacagttcttagaaaagggccatgtggacagggctgttccctggaaagtcctgtgacccctcagtgaccacttatttcttttgttgtcagcctttccctattttcttttcttttcttttcttttttttaagacaaggtgttgctgtgtcacccaagctggagtacagtggtggtaatcacggcagcctctaactcctggactcaagtgatcctcctgccttggcctcccgagtagctgggactctgcagatatgcaccaccacatgccccgctaatttatttttagtattttagaagcagtgttttgctgtcttgcccaggctcggcttgaactcctggcgtcaagctatcccacctcccaaagtgctgggattataggcaggagtgcccagccccagagttcttacaatgacttacaaggtcttacgtgatcttgttgcctcccttttgctctctgacctcatctttttttttttttttgagatggagtctcactctgccacccaggctggagtacagtggctcactgcagtcttcacctcccaggttcaagtgattatcctgcctcagcctcccgagttagctgggaatacaggcacgtgtcaccaggcccggctaatttttgcattttttttttcagtagagatgaggtttcaccaggttggccagtctggtctggaactcctggcctcacatgatccgcctgcctcggcctcccaaagtgatgagattacaggcgtgagccaccgcgcccggcctagtcacttttttcttaattgcaaccccgattctcagcacccttttcatcttggttttcctcaatagcccttaccaccagcagacacacatcatctgttgtacttgcttatttggcacatatgtatccacagcgcctagaacactgcctgtaacgtggaaggtgttcgatctatagagttttgtcgaatgaatgaatgaagccgactagtgcacagggagtgcagcggcgcgatggtagctctctgcagcctccaacacctgggctccagtgatccccgggctctgcccaccctccccactgccacttccgggcagaggccagcaaagcggcggcgcaagaggtagggagagaggagctgaggccccagatcagcggccgcgggcaaggtcgctcagcgggcacccggcctgggtatcggggcgcgggtcgggggcggggccggggctcaggggtggggccgggccgggccgggccgggcgcctgcgccataaaggccgccgcgcgcccacgcgcctcgcttgctgcgcgctgccggcgctccttcctcctcggctcgcgtctcactcagtgtaccttctagtcccgccatggccgctctcacccgggacccccagttccagaagctgcagcaatggtaccgcgagcaccgctccgagctgaacctgcgccgcctcttcgatgccaacaaggaccgcttcaaccacttcaggtgcgggcgggccggaggcgggggctgccacgcgcggcgcccggaaccgggcacgcgggcctggggtctggaggcgggggcagcggtgcccggggaccccagtccccgacctccaggccacggactggggcccaggccgagtccgcacttcgtccttggagtctccttggagtgcgttcctgggggcttgcagcctcgccgggagtctcggccccgggtctgcttcgttacgaggaaaaacgggcccctccgtggggacatttcccctcctcctccccgtgcagctctggccatttgagcaggggctcctttcgcagttgtgaagagaggccttggctgacgcagcaagcgggaaagggctgtccctttccatccgctcctggccacatgagcttgggagcgtctgcagggcgggcagcccgggcgggggtgtttgagggagctgggtggaaggatggagacgtcgggcgtgattcctgcagaagacacctgtgcacgaccgggaagtgggaaggagtgtttgagcaaatcatgggcgggagtgcggccaagggagctctgatcactgatactggtggaggcgggggaggggagcgactgtggctccgggctagacgtcccgatggccatccctgtcatctggatgggtgcctgagtaacttacggcagaaagtggaagccctgggaaggggtggtcccccacttcagtccgggctcctcatccagggtctgcctgcatctacggtctgtgaggatggcttctttctctgggctgctgttgcagatcatcctggtgggccagcaggtgacagacaccaccactgtgctgggtggccgcggcccttgtggggcgtgggtcagggaggatgtttcttctgggaacagctcctgcttagggcatggctccccgctagggagaccagggtgtggtcagcagcatctccatctttctgcagcttgaccctcaacaccaaccatgggcatatcctggtggattactccaagaacctggtgacggaggacgtgatgcggatgctggtggacttggtaatgttctgcttggggaggcataactggtaaccgacagagtggtgggtgagctgggctcctgggagtccccaggaccttgagtatcttgagttcttcctctcattagacctcagtcacctcctctgtgctggtgaggcacctgtccctggcttaggttctaagcagcatcccagggaccccagtgtctgatgtctgagtagacccttcccagacagcaggggagggaaccagacagcagccgtctgtctgtctcattggggacagcaccaagccttgtgtttgggggctgacacttggggtggccagtgtgggtgggaccaggcctcagtatcgtctcttcctaggccaagtccaggggcgtggaggccgcccgggagcggatgttcaatggtgagaagatcaactacaccgaggtgagcaggccccacataccctctggggcctccttccttccctttggggtttatctgactgttagccgcatcaccctgtgtcttcaccccttctcttgggcaatgcttttgcttaatgaggggcctgaaggcctttttcctcctgcttgtagcagggctttggggtgtgccttccacaagattggtttggtgagctccttggaatggttcccagtgtctgcctgggaggagcatatctcatacccacagggagagtttctcaaggctgacattttcttggagaagttaactctaatatatcctcaatgcaagttttagtagcgacaagaagaatcttagatcaccaaagacttcagcctactcaagcagtaggagtcaataggaagcagtggtgaggccaggcctgggggcccctgttcctgactcagtatgggagcccagcctggaggtataatggacactgagcacccagactctgtcctcatgatgtcattatcctcctcttacatgtgaggagtctgaggttcagaggtcacatcacttatctaagatgtcatagctgtaagaggcagaatggagattcacactcaacctgtcttgcattgtgggtctaagctgagagaggatgcaatcaaggaaggctttctggaggagtgcatttgccaataaaatgtggcgcaggagtggggtctggcagggtgagggtggggtggcatgaagccctccaccttagcaagcctctcactgggtcggaatcccaagatgatccttttcctgcccacctggggtcgttagaccttccctcaaggactcctctgctgacttcaggccatttcactcacgtggctgggccagccgcctggcacccgtcacagacttcaagtctggtttggttcctggcagttggtagttatcgggctgcttggtgagggaagcttgagttgcatgccttgctgcaaatccaaggagctgaggacactgcctaaaacgtgccagcaaacaccatggacacacattgggaggatgaggttacttcaggcttcatgagcactcatcttcggaaagcgtttatttatttatttattttgagatggagtcttgctctgtcgcccaggctggagtgcagtggtgcgatcttggctcactgcaacctctgtctaatgggttcaggcgattctctgcctcagattcctgagtagctggaactacaggtgtgtgccacccccacctggctgatttttgtatttttagtagagacaggatgtcaccatgttggccaggctggtctcgaattcatgacctcaagttatccacctgccatggcctcccagagttccgggattacaggcgtgagccatggcgcccggcctctgaaagcatttattgcttgtttctgacatgtattgttgccattctctgcctttgctcactgttcctcttttctctcactgttcatgccctgagcatctctggcaggccttcggggcctgtcctaggcatatatgggtcccctcctctcctcctgactgtctgcagcacataagtccttggggagctcctactcctctaagcatacagtgggttcttggaacaaggttatggtgctaacagagacctcagggcctgcctgtctagtggatagagggccgagctatggcaccatgcccagctgggagcatggctgcctggggttggggggggcagtctttatatcctgaccgtaatccccagggtcgagccgtgctgcacgtggctctgcggaaccggtcaaacacacccatcctggtagacggcaaggatgtgatgccagaggtcaacaaggttctggacaagatgaagtctttctgccaggtaagtggctactgggccggactcacccttggccgtgtgtgtgagttatttgggaatctgggagccctaaggggcagctcttccctcttcttgtaggcaggactcaggttctcactgcagcttaagggaggggttgcctgtgtgatcgctgaccctggagtctctgctgaggcctgaatttctcctggctctgctctgaaggaatctgctgctggcagaagtggggccagtttctttcctgaattgtagacacctatggactcatggtgacaaaccacagaggcttcaaatgaaaagtggggcccctgagagacaggacagtcaggaaaggaaggagctttttcttttttctttttttttttttgagatggagtctcactctctcgcccagagtggactgcagtcgtgctatctcagctcactgcaacttccgcctcctggattcaagctattctcctacctcagcctcccgagtagctggaattacaattatgcgccaccctgctcagctaatttttgtatttttagtagagacgggatttcaccatgttggccaggctggtctcaaacccctgacctcaggtgatctgcctgcctcacctgggattacaggcatgagccactgcgcctggccggaaggagctttttctaatctcttttgtcatacgcccttatcacccagtctagaaacagataaaacattgtaaaatttcctcaaccctggctgggcgcgatggctcatgcctgtgattcctgaactttgagaggccggggtgggtggatcacttgaggtaaggagttcgagaccagcctggccatcatggtgaaaccccatctccactaaaaatacaaaaattagccagttttggtgacatacgcctgcaatcccagctacttgggagactgaggcaggagaatcgcttgaacccgtgcggcagaggttgcagtgagctgcgattgcgccactgcactccagcctgggcgacagagggagactctgtcaaaaaaaaaaaaaaatttcctcatccccattcccagctaaccctccagaagcagcctttgtaaagtttcctgtagccaggcgcagcagctcatacctctattcccaactattcaggaggctgaggtgggaggatggcttgagcctgggaagttgaggctgcagtgagccatggtgacaccactgcactgcagcctgggcgacagcaagatcgtgtctctaaataaatttaaaaaatagaaaagttttcctgtgaagtcttccagaaagttcctgtgcacatacacatctgtcatctcctctttgaaacacgtacacatgtgcacatgcacacaggttggttttctccctgctcctctgaagcttatttccacctggaagtatgtaagcagtgtccgtgtgtcagtgacagtgcatgtaacatgccttcttttccttgtgtgtagggtggtaggggttgcctcagagaccagctaagtttccccacatcaagcacttgcctcagtgtctaccctagcggtgattctgcaggggtgggttggcagacatcctcacgtctggagaacgagggtgatgccggtgtgcctgtgtgggctgtgcatgctacgagggtgatcgtccaaactcttgtcagctgtgatcatttgctgcttgtcctaggagcagtggcctccatgtgtggctggtcagagtccagttactttggccaagagccactttcagacctgaaaatgggctgggtgcagtggctcacgcctgtaatcccagcactctgggaggctgaggcaggtggatcatgtgaggtcgggagtttgagatcagcctgatcaacatggtgaaacgccgtctgtactaaaaatacaaaaaaattacctgggcgggcatggtggcgagcacctgtaatatcagctactggggaggctgaggcaggagaatctcttgaacccgggaggcagaggttgcagtgagccaagatcacgctactgcactccagcctgggtgacagagtgaggctctgtctcaaaaaaaaaaaaccaacaaaaaaaccaacccatctctggaaaaaataaataaatcagctaggtgtggtggtgtatcccagctacttgggaggctggggtgggaggattgcttgagcccgggaggttgagtctgtactgagctgagattgtgccactgtcctccagctcaggtgacagagtgagacgcctccagggcaaggaagttgtggggtcctgatgggaatctggatttcctgaatgtcacttagggtgatcagtccatgtgatggtctttgggtgtgtggcggggcctttccagccatctgctgtgagtggcagagctgaagtgcattaaaagcctagtgctgtgtgatcagtctgggtgtgctcagccatgccacatggcgaggatggcactgcaccgtctggggtgctgtttccaggaaagccttcccttaaagctggccactggagtacctgactcaggctgataaggtatttatagttcaaaaaaagttgctgaatggcagtaatcccctggtgaggaacattccccatggctgtgctctccaaagtttgccaagattgggtgaagacgttcactgtgaccttgattgtagtggcaaaacctgaaaccaagctgtactcatttgtcaggggacttacaaagtagagtcagcacatattcatatactgtcatcctgggcaccaatagggattagggagctatagttggattgatctgccatgctgttcaggatggactgggaagttgaaaaaggaagttgcagaattggtgggtatggtaaagactcatttggtcaaatgaaggctgggtgtaattgtaataaagatagacacatttggcttggtgcagtggctcacacctgtaatcccagcaccttgggaggccgaggtgggtggatcacgaggtcaggagttcaagacaagcctggccaacataatgaaaccccatctctactaaaaaaaaatacaaaaaagttagcctggcatggtggtgcatgcctgtagtcccagctactcgggaggctgaggcaggagaatcacttgaaccccagaggtggaggttgcagtgagccaagatcacgccactgcactccagcttgggcaacagagtgagactttgtctcaaaaagaaaaaaaaaaagacacatttttcctctgggatgcttcattataacaaacctttgacagtcgggaaaggagacttgcttttttttttttgagacagagtcttactctgttgcccaggctggagtgcaatggcgagttctcggctcactgcaacctccgcctcccaggttcaagcaattctcctgcctcagcctcctgagtagctgggattacaggcatccgccaccacacccagctaatttttgtatttttagtagagatgaggtttcaccatgttggtcaggctggtctcgaactcctgacctcaggtgatccacccaccttggcctcccagagtcctgggattacaggcatgagccaccacacccagccaagacttgctttttctaacctcttttgtcacacgcctgtgagggagggttgagaagttgaacaacttattttatttctttctgtattgatggaaattttcccatggcagtttatttaaagaaaaagtagggccaggcacagttgctcacatctgtaatcccagcactttgggaggcagaggcaagaggattgcttgaggccaggagtataataccagcctgggcaacataacaagaccctgcctttaacaaaaatttaaaaattagccagctgtggtggtgtgtacctatagtcctggctgcttaggaggctgaggcgggagaattgcttgagcccaggaatttgaagctgcagtgagctatgatcatactcctacattccaggtcgagcaacagagcgagaccctgtcgttaaaacaaaactaaaaaatacccagcaaggtgcagtggctcttgtataatcccagcattttggaagggtgaatcggatcactgcaggccaggagttcaagactagcttgggcaacctagaccctgtctcttttttgtttgtttgttttttgagacagagtctctctctttcacccaggctggagtgcaatggcctgatctcggttcactgcaacctccgcctcccaggttcaagcgattctcctgcctcagcctcccgagtagctgggattacaggtacctgccaccacacccagctaatttttgtgtttttagtagagatggagtttcaccatgttggctaggctggtctcgaactcctgacttcataatctgtccacctcagcctcccaaagtgctgggattataggcgtgagccaccgtgcccagcctattttttttttttaattaaaaaataatttatagtctgggtgctgtggctcacacctgtagtcctagcactttgggaggccgaggtgggcggatcacttcaggtcaggagtttgagaccagcctggcctacatggcaaaacccgtctctactaaaaatacaaacaaaattagccaggagtagtggcaggcgcccataattccagctactcaggagactgaggcagcagtatcatttgaacccatgaggtggaggttactgagagctgagatggcgccactgcactccagcctgggtgacagagcgagactctgtctcaaaaaaaaaaaaaaaatttataactgggcatggtggtgcatgccggtagtcccagttacttgggaggctgaggcaggagaatcgcttgaacccgggaggtggaggtttcagtaagctgagatagcaccactgcatgccagcctgggtgacagagcaagattccatctccaaaaaaaaaaaaaaaaaaattaaaagaaaattgctggatcttattagtgtatagtaattttttattgatgtgtgggaaattattccaaaatttagcaactagaagcaacaatcaccgtctctttatgtggggaatttgcagtggctgtgtttggtgtagtggctctgatattctaaggttgcagtcaagatgttggctaaggatgtggtcatttgaaggcttcatgggggttggagggtctgctttgaagatggctcactagcagtgctgcctttgggaggcacagacagttcgagtgtcctcatgacaaggcagcttatttctcccagagtgagtgatccaatagagagtaaggcagatgcctggaggtcttttgtgacctaatatcaggattcacattctttcttttttttatttttatttttttgagacagagtttcactcttgtcacccaggccagagtacaatggcgtgatcttggctcactgcaacctccggtccccggctcaagcgattctcctgccttagcctcctgagtagctgggattacaggtgcccgccaccatgcccgcctttttttttttttttttttttttaaatttttttagtagagatggggtttcaccattttggccaggctggtcttgaactcctgatctcaagtgatccgcctgccttgccctcccaaaatgctgggattacagggtgaaccaccacgcccggctacactctttgatttctataataccccgttggtgttacagatcagctctggtcatcatgggaagggactgcatcagtgggttaatgccaggagacaaggaccactggtcaccatcttagaaggtgggggactatcatagtcccgcttctggcgcctagtgattgattttgttccttccacacacagataccccactcactttctcctaagtccatattctgttacagtattagaagtctgttagaagtctagaacctcattttgtcaagtacaggtgtagtagtacctgcatttcctttagtacagttcctttcaatctgaagacatgagaatttaaagagacaaattacccctcacacacccagcatacaatggtgaggtgggcatgggatgactggtatgtatgggataattatttcttttcttttctttcttttttctttttttctttgttttttttttttttgaggtagggtctcacactgtcgcccaggctggagtgcagtggtgcagtcactgctcactgcagcctcgaactcctgggctcaagcaattccccacctcaaccttctaagttgctgggactacaggcacatgtcaccatgcctggctacttttttattttttgtagagatgacgtcttgctatgttgcccaggctagttttaaactcttggcctcaagtgatcctcctgcctcagtttcccagtaagtgctgggattataggcatgagccactgagtccggcctgcatatttaggtttttattatgaccacactgtacttctgataccaaaatctgtattagttatctatcattgtataacaaatgacatcaaaacttgggttaaaacagcaatacacttttttttttttttttaagacggagtcttgctctgtcgcccaggctagagtgcaatggcgtgatctccactcactgcaacctctgcctcctggatttaagcaattctcctgcctcagcctcccgagtagctgagattacaggcacacgccaccatgcctggataatttttgtattttttttttttagcagagacggggtttcaccatgttgactaggctggtctcgaactcctgaccttgtgatctgcctgccttggtctcccaaagtgccaggattacaggtgtgagccaccatgcccggcctagcagtaaacttttattacctctcacagtgtctgtgggtcagaagtttgggagcggcttagctggttggtcttggtttggggatctctcataaggctgtagtcaacatgttggccagcgccccagttatcggaagttttgatgggtttggaggacccccctctaaagtgtcccatacacaggaagcgagttggctgtgacttttggaaaaaggccttagttcgctgccgcgtgggcttctttatgaaactgtttgaatgtcttcacaacatgatagacagcttccccaaagcgagtcatccaagagagcaaagcagaaactgcacgttctctgaactcacttctgaagtcacatttcacccctttttgcagtctctggatgggtgcataggtcacccctcccagcacaggcggaagctatgcagaggcatgaattccaggaagcaaggatcactggtgtctgattggagactggctgcgggtctgatactcctttccccagcatagcccagtcacagttttcaacatttcacatctcttggtctctggcatagcagattctgccgagttatccctggttttgcaaattctgacagtgtcgctgtaaggtagggatgtctcactgttgtaaccaggaaagagtctagttggtggtgagtgtggcagggaccagtgtggtctccagagactcctatgccttgtgtagtggctcacgcctgtaatcccaacactttgggaggtcaagatgggaggattatttgaggccaggagttagagaccaggctgggcaacgtagcaagacgctgtctctacaaaaaataaaataggctttgcgtggtggctcatgcctgtaatccaagcgctttgggaggccgaggcaggtggatcacctgaggtcaggagtttgagaccagcgtggccaacacggcgaaaccccatctctactggaaatactaaaaattagctgggcagggtggcaggtgcctgtaatcccagctacttgggaggctgaggcaggagaattgcttgaaccctggagcctggaggcggaggctgcagtgagctgagatcgtgccgttgtactccagcctgggcgacggagtgagaccctgtctcaaaaaaaaaaaaaaaaaggctaaagcagagcattttgttctgtttttggagtcagggtcttcctctgtcacctaggctggaggtgcagtgttgcgatcttggcttgctgcagcctcaacttcctggactcaagcaatcctcctgtctcagccttgagccaccctgcctggcccctaaggcacagttttaaaaataagtaaatagcgaggcgcggtggctcacacctgtaattccagcactttgggaggccgagctgggcagatcacttgaggccagtaattcgagaccagcctggccaacatggcaaaacctcgtccctactaaaaatacaaaaaaattagctaggcatgctggtggcgcaggcttgtagtcccagctactcaggagactgaggcatgagaattgttagaacccagaaagtggagactctgtctcaaaaaaaaaattaaaaataaatagctgggtgcggtggctcaagccagtaatcccagcactttgggaggctgaggcgggcagatcacagggtcaggagatcgagaccatcctggctaacacggtgaaaccctgtctctactaaaaatacaaaaaactagctgggtgtggtggcgggcgcctgtagtcccagctactcaggaggctgaggcaggagaatgacgtgaacctgggaggcagagattgcagggagccgagatcatgccactgcactccagcctgggcaacagagcaaggcttcatctcaaaaaaaaaaaaaaaaaaaaaaaaaaaaaaaaaaaatatatatatatatatatatatggtaaattaaaaacaaaaaaatagaggcacctgcgagggcctgaaagctgggactgaggtaccaggacacggcagtaatgatgtttttgagcagcggattatgcctgggggtttgggctgatggcatcttcgcccctgtgccagcgtgtccggagcggtgactggaaggggtacacaggcaagaccatcacggacgtcatcaacattggcattggcggctccgacctggtgaggagaaaactgccttggggtagggtgggagtctgggcactgttggtcccactcaggtctttactttctccagggatgggacctggctgtctccacttttcgtgggccctgaattcttattctctgatgctatgtctccccgcagggacccctcatggtgactgaagcccttaagccatactcttcaggaggtccccgcgtctggtatgtctccaacattgatggaactcacattgccaaaaccctggcccagctgaaccccgagtcctccctgttcatcattgcctccaaggtatgagtgccgaaaactgcccggcccctggccctgtgtgtgttggggtggggagggacagctgtcttgccatccccctggccattggtcccttttggtgggttccgagtgaaccatggtttgtggatcaggtcagtacagctgccctagactgtttccatgcctagcagcaaataaggttgactgatgaaatcctgaacacatcagtttgaacctttgtgtcctgaccacacccgctcgccttgcggcatctctgctcagcctgggactgctcgccactttcttacaaacctgtcctttatgcctgctccttttcttgttgttgtttttgagacagagtctggctctgtcacccaggctggagtgtagtggcgtgatctcggctcactgcaatctccgtctcccaggtttcaagcgattctcctgcctcagcctcccaagtagctgggactaggcacacaccaccacgcctggctaattttattatttatttatttattattattattttttagtagagatgggcttttgccatgttggccatgctggtcttgaactcctgacctcaggtgatgcacccccccttggcctcccaaagtgctgggattacagtcttgagccgccatgcccagccatgcttgctcctttctgatcccagagccatgccctgataatagaggggttttgtttgtttttatttatgttctatttactcacatgaatgtacataaaatatgaagaattccatctgaattctgagataccttccagcctgggccgaagagagcctcaggttgactgcagcccctcaggggagaagctgcggcctttgacctgcaggcttagggttggggggtgtgtttaccgtcccccctcctctggttttaaagagctggaatctcaggaggttatgtggcgtcactgtcactgacctgcaaatactgctccatgggacagctgggcattgccttggcctctactgctgaaccctggctcaaggcctgcacccacccctaagctcgggcgcccactgctgttctctttggttgcagacctttactacccaggagaccatcacgaatgcagagacggcgaaggagtggtttctccaggcggccaaggatgtgagtgggctatagggccttcctcgtggttagcctctgggctgggaagagcagggtgggcccctgagtgaccaagtctggccgtgtttctcctgaagttggaagtgaaggcggccttgccggtgcctgcctttgctagatgagatgattgttcatcttggctttgtcagacccagccttgcagatgtgacagaacctgctctcgctggctgacagcccttgcatggccctttctctgcaggcccttggcgctgcaggaactcttggccacacctattttataggggagggacgtccctgagccccgtatgcttgtaagatgggatgagcaggcggcctgtgacccgtctgctttcttgaccttgacctcgatgtgggccttctccaacagtctcagaaccaaggactgggaatctcagtcccatgcagggccttggttcctctagtgatgggaagtgactaccctttgtctccctgggctggctgtggtaacttggctctgtctcttgtagccttctgcagtggcgaagcactttgttgccctgtctactaacacagtaagtgcccccgtggtcccctgtactgccttcctgggagtgcccagcatgtccaggtcatggcctctcagagacgcggttcgtaggtctggtggatcttggcttggctgatggtatggaaggtttggttgcctgtgggctgcaagccttccttgccttttccgcatttacccattcaacctctgcagctttgaggagggaggcttggagtcagtgggatcacgataaccccttcttccgtctcccaggcctgactgatacacagaacccttcatacacatgaccttcctaggcctttgtgcccagcatctccccaaatgtgacatgctaggtaggggtagaggatgcattccatttttcacttaaggacataaagccccaatgaagggaggtgacattttgccccctacttagtgtgtgtggttttgttttttttttttttttttttttttttaagacagtctcactctgttgcccaggctggagtgcagtggcgtgatcttggctcactgcaacctctgccttccaggttcaagcgattctcctgccttagcctcccgagtagctgggattacaggtgcacgccaccatgcccagctattttcgtatttttagtagagacggggtttcaccacgttggccaggctggtctctgactcctgaccttaagtgatctgcccacctcagcctcccaaagtgctgggattacaggtgtgtgccaccatgtccagcttattttttgagacaaggtcactctgtcactcaggctagagtgcagtggtacgatcttggctcactgcaacctctgccttctgggttcaagtaatttttatgcctcagcctgctgattctgggattacaggcgcccactaccacgtccaggtaatttttgtatttttggtagagacaggttttctccatggtggccaggctggtctcgaattcttgacctcaagtgatctgcccacctcggcctaccaaagtgttgggattataggcatgagccactgtacccggcccacttagtgactgtatgagtaggtgatgccaggattagaacctgggtctcctgtctccaagttctcacagtctgcctggcctcgaggttgtgcaggctcagcagggcatgacagagtgagggatgctccaggagtgacagcagcagtcagccagtgggcactgtgctgtgtcagagctggggactacacccacatctccctcccaccccctccaccatcatccccacatctctgcctccagtgcctacccagctgcagcaggacgccataaggctggctaaccatagcactgttgcctgcctgcaactgactggtcagtagggcttctcctcctatgtggaataggtaaggaattgctggccctgtctgccctggggaccagaatacctgatggctcctcagagcttcctggtgcagtcaccctcccacacatgggaagggctgggtggctgttcagcctgtgtttgtttgcctggcctggtaggtggcccctgcccacacttgggtcccagtcctaggttcggttcccagatgtccaggggtatcatgctctggtgtcccaggcaggcctgggtgagagctgttgcagagcagtgtgtgggccaggtcctcacacggggttacagctgccctcagcagggggctttgcaggcacaacgtcactggcgtgctggtcatggactgatctggtgtccagcttggggtgggcagatcctgggccctgccctcgactcacaggctgctccagccctgccccatccctggctctggggaaggtgaggctcagctcacggagcacagctccctgcctcccggagctcctgttcccatcccgctagcaaatgcttctttgcatttctctccctttgtttttttttttgtagaccaaagtgaaggagtttggaattgaccctcaaaacatgttcgagttctgggatgtaagtacaagcacttctgcactgggtgaattaagtgtcctttgccaagtcatggctgttgagaggcccatgaggtcaggtcagtgtttattgagtacctgctgcatacctagcttggggaaaggtagagaggccctcagagaggcttggagggcaagagcaacccaggcaggatgagggctccacttccacctgagggcgggctgagcttgcagggccacatgacactcccttgggtgcctgcctgcaacacccactgtggggtaacccgagtcccccttgccacgctcacagagttgaggttgtgagttattctcagtgatgacctttctctgaactgcagccaccatctgtaaaggccaagggcagggtgaggcatgaggtatgaccgggtaggcctggaaaggagcaacaggagctgcaggaggagctgggggggtggcgtagaggaggcgccaggctggggcagcttgcagagcaaaccctgccttgagtgacagggctgccgacccctctgtagcaacaggtggtccatgggaccacctctgctggagccgagcagtgagccacagctttccttgtgcacttgcctgagctcagcagtggtgtgaggagggctctgactgtgaagcccagggtgcaggggtgcagtgcagggtgtgatgcaggcactgtgaatgctgtgggcatggccgggcttacgtgcagggctctaacgctgtggcaggcgcagcagagagggcattgcccatttggtggttttcccacctggggctgtctccaggcatttggaccagaggccctttgcttggtgatggcatccacagacataacctcattcctttgaaagctctaaaggccttttactaccagggtctgggagagaatgaagccctaatcccttaagccatccactgtgtataatgagttaacttctttctagaatgagactagttacataccatccttggaagaattgacgagaatcactcaagtcattttctgcatcctgtggctcagatgcggaacactggtcaagagagactgtgcggcttctaataaatgttgcatggctgataatggagggcaggcaccttccacctcctccttgggatctggagcctgagcaggtggtgggcagggatgtgtgggtgctgctgccagccaaggagccaagcagatcggggtgtccttgcttgtcaccacccagcatgtagagatgagttagggtgtggcttaaggagaggatgggtctggcctcccaggtaaggcctaggaatgatagctggacacaggaacatggggccagggctggctggtgagacctaagtggaggcctcctgggccaggctagacagcccacaacggctggaggagggacctgcctgagttactagagtgtatcctgctgaatcaagaaggtgatatctgaagaacccagggataggagcaggcgaagttcctgcaggtggggtctcgggtgagctacagccatcagctcaggcctagggatgcagtgccggccctcaggtgagatcagaagagtcccgtctggtaggggtatgtagaagaggtaattcttggtccgccagggccagttttgcggcagccatgggtgtcgggatcaggcaggggtgtggtgggaaaccatggggtctctcagggctcggccagggtcagcgcacgccacagggccagttttggctggagaggcctgaagcagagccagagcaggtccaggtgagttctgaagaggagccaggacaggagagggacccataggtctgtgaattccagaggagaggcaggtatttagaggtggttctgtcaggtgaagtctgaggagccaaagctatgtatgtgcatatgtcagccgggctctgtgggaggtggtgtagacctatggcatgggacaggtgtgcacgctgggatctctggccggttccgaaaagtgaggatcaggtagtgggtggctgattgcacaagtttagaacccaggattagggacacacaggtcagcacctgcttctcagcatcctgactgggtgtgatgggcagagctcagggcgtcagaggcctctgagaatttgtgactgaagtccaagtctgtggcatcagggtctgcagagcccagatgcgggagaggtaggaatgtacctggtgatatgaggcaaggacaggggagctggggcaggtgaggcaggcaggtggcatgaggagctgtgctgggtgggtgcggtctgagtggctcaggttgggtaaagggccagagacctgggtctacagggcagacatcaaggctgagccagtcagacagtgtttgtcaacactgggctctcaccaggctccctcaggccgaggtcagcagccagggatctgtcatgtgtgaggaaagtgtctgttcaggttaggtgtgtataatgcagcctttcagagccgcgtctgtctgaggtcctaggagctggaatcagacaggtttgtatggctgggtttctaggggaggcctgaggagccaagactgtactcaggtaggcagaactggaccagtctggtaaggacgttggagctaaagataggcagacaggtcgagctgggtctgacaagtgagggctgaaaatctgtgattgggtccaggttggagctgtgtccttgggcgatgtctgagcagctctggtgggtgagcctgggtcccctgggaagagaccagacaaagggatggggtcagacaaagggatgacgaaccgcatccatcagaaaggtggatgaagcctgggtctggtcgaggtacgtagagcagatctagcaggcgaggtttcaggggttaaggtgagacacaggtatgtatttttgggtctcacaggttaaggtctgagccactgaggtcaggctctggtttgtatcccaagaccgagaagctgtgttaagcatggtgggtagagtttgtcaggtgacatctatgaaaccaggagcatgcaaagataggttgaccggaacagccatggtcaaaccaattaaactgtcctgcagttgaggtcaggcacaggtagaacggatctatcaggtgaggcccaaggagtccggattaggctcatctagaaagacctggatgtggtagatgacctctgaggatatgaagtgaaggcaggtggatagagccaggtctctcaggaggtctgaggagctgggatctggcacagtgagcaggtctggatttcccaggtggtgtcaagacagatgggtaggccaggcacagtggctcacacctataatcccagcaatttggaaggccaaggcaggcagatcagttgaagtcaagagctcgagaccagcctggccagcatagcgaaaccccgtctctactaaaactacaaaaattagccaggcatggtggtgcatgcctacagtcctagctacttgggaggctgaggcaccagaattgcttgaactggggaggcagagtgagccaagatggtgctactgcactccagcctgggtgacagtgagactatctccaaaaaaaaaaaaaaaaaaaagcgggggttgggtgtggtggctcatgcctgtaatcccagcactttgggaggccaaggtgggtggatcatctgaggtcaggagttcaagaccagcctggccaacatggtgacggggtgaaaccccatttctactaaaaaatacaaaaattagctgggtgtggtggcacacgcctgtaatcccagctactcaggaggctgaggcaggagaattgcttgaacccgggaggtggggtttgcagtgagccgagatcatgccactgcacttcaacttgggcaacaagagtgaaactttgtctcaaacaaaaaacaaaaaaaaaaaaaaaagaaaaaagatgggtgggtagaagttcttctcctgggtgaggttgaggagctgtggccaggtacaggtatgtaggtatgtggaattgagtttcttgggtgaggtctttggagcctggcccaggtacatcttcgggtctatcaggtctgaagaacgggagttaaacacaggtgtgtagaacagggtttggcaggtaaggtctttggagccaggatcagggcagcttcacaaagctgagtgtgttcatgagacctaaaaagtcatagtcaagcccaggtaagaagaaccaagtgtgttggatgaggtgtaagcagctgaggtgtgaagtagaggtaggcagagctggcccacaaggtacaagctcaggaaccctcatcacatgcaggtagggggtgctggtccaccaggcacaagcccaggagccagcattgagcacaggtaggcagacttggcccaccaagtatgatctgaagagccaacatcaggctcaggtaggtagatctggcatgccaggtgtactccaaagagccagagtcaaacacaggtaggtagagatagtctttcaggtgtggtttaaggagccaaggtcaactacaggtaggtagagctggcccactgggtgtggtttgaggagccagggtaagcacaggtaggcaaagctggcccaccaggtatggtctgaggagccagggtcagactcaggtaggtagagctgcctgccaggtatggtctgaagagccaggatcaagtacaggtaggtagtctgggtcactaggtgtggtctgagaacccagcgaaaagctcaggtaggtagagatagcctttcaggtgtggtctgagaacccagggtcaagcacaggtatgtagagatagcctttcaggtgtggtctgagaacccaggttcaagcacaggtaggtagagatagcctttcacgtgtggtctgagaacccaggttcaagcacaggtaggtagagatagcctttcaggtgtggtctgagaacccagggtcaagcacaggtaggcagagctggcccaccatgtgtggtctgaggagccagggtcaggcaggtagacaaaactggtctgccaggagtagtctcttgaaggagagctgaggagttaggttgaatgcaggtagatagagttggctctttcaggagttggattcaggcacaggaatgtgcccctgggtgtttgaggtgaagcctgaagaaccagagttgagcctaggtgtatagagcggcctcccaggtcaaccccatagcatgggggtctctacaggcaggcagaacattgtgggtttcctaggaggtctgtggcccctaagttagacgtgggtaggtagatgtatctctctcaagcaaggactttgtagctagagagacatacagctggggtcttgcaggtgaggtcattggtgcgtggttctggcttagttgtgctgactcagtcttaggcctggggacagtgggttagtcacaagttggtagaactacgcatctcagctggggagcacaggtaggcagagatgttccatttgatgaggtctgaggctcctcagtgagctcattggtgctgacgttaagcagagattggcagcattggatctgtctgtgagacatgaaaagccaagccagacacaggatgtggactgccgaggccaggctcacataaataaagctggaccctgggaggctgtaaggaatctgagttgggcttaggcaagggaaccgggtctgtcagtcaaggtgtgaggggtcaggttatgtgaagcctggtctatcagctgagatgtctggaacccatctttgacaggtatataactctgtagcctgaggcactggagttggacacaaataggcagaactaggtctcccaggtgaaaccattgcatcgatgctcagtgctggtatgtttatctggtgttgtcagtgagtctgccgatgcaggctcagtgctggtatgtttacctgattatgtcagtgagtctgtggatccaggctcagtgctggtatatttacttggttgtgtcagtgagtctacggatccaggctcaatggtggtatgtttacctggtgttgtcgtgagtctgtggatccaggctcagtgctggcatgttgacctggtgttgtcagtgagtctgtggatccagggtcagtgctggtatgtttagctgacattggcagtgagtccatggatccaggctcagtgctggtatgttgacctggtgttgtcagtgagtctgtggatccaggctcagtgctggtatgttgacctagcattggcactgagtctgtggattcaggctcagtgctggtatgttgacctgacattagcagtgagtctgtggatccaggctcagttccacagaggttgtataaacatggtctcaggtgggttcttgacacctgggttcaagcacaaaagtactgctgggcttgttaggtgaagtgggtggggtctagcacaggaatgcataatggtgaggctggccaggcctggggaaggtgggtcagacacaggtgagaccttcggtggtagggtcagacacaattaggtgagtagtgtgggctcttatatcaagggaaagccgtagtcattgtaggtgtttgtacctgggtctgcctggtgatgtctagggaaccctaaagatcagctgggacaggtatctgttctcagcaccctggtcaggtatgatagacagagctcagggtaatacagagggctgaggatctgtaaccagtccatggtgttggtctgcatccaagatggcattgtgctccagttgacacagggtctgagttaaaagtgaggaaagttgccaggcgcagtggctcacgcctgtcatcccagcactttgggaggccgaggtgggtggatcacttgaggtcaggagtttgagaccagtctggtcaacacggtgaaaccccatctcctaaaaatacaaaaattagccatgcatggtggcacatgtctgtaatcccagttactcaggaggctgaggcaggagaattgcttgaacctggcaggcagaggttgcagtgagctgagatcatgccactacactcaggcctgggcgacagagtgagagaccctgtctcaaaaaaaaagaaagtgagtaaagtgaggaaaaaggtagatgatggttagataaggtgagatctggggcactggggcaggttaggcccaggacattgaactgactgaggagctgcatctataatgtatggtctcagaggccactgcacttaaaggtgaggtctagagacccatgtctgcagattgagggttcggaggctcaggtcagacactgcttggcattgctgggctgtcacaaaactgggatctgaggacctgttctcggccaaggtgagcagcctggactctgtcagccagagggctggctgtgtgctgaagtttagtttctagagctgagtctgggctgggtgtggtggctcatggctgtaatccctgagcttcgggaggctgagatgggaggctgaggccaggtgttcaaaacctgcctggacaacagagcaagaccccatctctacaaaaaatttaaaaaatagtcaagcatggtggtgtgtgcctgtagtcccagctactggggaggctgagatgggaggatcacttgagcccaggagtttgaggctgcggtgagctgtgatcatgccactgcactccacctgggcaacagagcaagaccctgtctcttaaaaaaaaaagaaaaaaatagaactgcatctgttagatgagatgtgagagcctatgtcaagcatgatgtagtctgtaggactgcgtctgtcaggtaaggttcccggaaacccagagcctttccaagtgagtggccccaccggtcatctcattgcccaagccagaaacctctcggccacactggagagctcccagaatgagtcctctgcactccccagtccatctccggggcttcaaagtggcttgtttgcttctgtccttgtcttagccgcagactgttctcagtcctcccaccgtgcctctcagcttccaccctgcggtccccaccccttcctttatcctctggaaggtgctatgcttccccctgcctcagtgggcttccaggagagaattaagccctcacagcccaaggcatctactggatgtaataagtgggcacctctccttcgtgtctagaaggttactagtcttggaccatccttgggagaactgagaagtcactcagatcattttctgtgggccttaattctgtcacgcttgagaaagactgctttggccacgggacctttgcatgtgctgttatggctgctggaatgctccctcagtgcttctctgggtcatgcctgctcgttcttgagatcaagggtcaagtacccctcaggttccttttataagtggcctcagcaccatgttccaatttctcctcagcacttgtttctcagtttcacatttattggcatgattatttgatgtacgtctctctcccacactctgtgtccgttgcctgtgctagaaatgtgggaggtgctccataaacagctgttaggaagacatccgtgaagttctgaggactctgatggcaccaagtggagcttgcaggtgtggcttgagaaggtgcagtgtgaatgataggcctaggtgataggccgagaagatcggtcaagcccagatatgacccactgggcctgtcagtgtccaggaggtggggtgaggcacaggtctaaggttctggatctgtcagtaccacctgaggagttgggaatgggcacaggtacaaagtgatgagtcttcattgttcaacaaagaatggcacaggtgtgaggatctgggtttgtcagtatctgaggatgtggggcctggcacaagtatgaggcactgggccactgttcaagcaggtgggctggggaacagaaatgtagctgtgggtttttaatatctgaggagacctagccaagtgtagcagagagctgctgggtctttcattgtccaaggaagcatacctgggcacaagtatgagactgagaaggtgggtcctggcaccggtaaggggctctgggtctgcaagtgtctatggaagtagggcctggtacaggtatgtggtgctggaagaggtatccaaggaggtgggctaagtacaggtatgacatctgggtcttccagtgtgtgaggaggtaggatctggtacaagtatgaggccctgggtctgctggtgtctgaggagataacagcaggttacaggtatgaggccctgggtctgctggtgtctgaggaggtaacatctagtacaggtatgaaatctgggtcttcctgtgtctgagaaggtagcacctggcacaggtatgaggatctgggtcttcccaatgtttgaggaggtagcatctggcacaggtatgaggatatgggtcttccatgtctgaggaggtagcacctggcacaggtatgagaatctgggtcttccagtgtctgaggaggtagcacctggcacaggtatgagtatctgggtcttcccgtgtctgaggaggtagcacctggcacaggtatgaggatctgggtcttcctgtgtctgaggaggtagcacctggcacaggtatgaggatctgggtcttcccgtgtctgagtaggtagcacctggcacaggtatgaggatatgggtcttccatgtctgaggaggtagcacctggcacagatatgaggatctgcgtcttccagtgtttgaggaggtgagtttggactcaggtttgaggcccttgggcttccagtgcctgaggagatagcatctggcacaggtatgaagccctgagtcttctagtgtctggggaagtgaggctgggtacaagtatgaggatctgtgtccatcagtatctgaggaggtgggatcgggtcctggtatgaggatctgggtctgtccatgtctaaggaggtaagatctggccctggtatgaggatctaggactgtccatgtctgaggagttaccatctggtacaggaatgaggatctgggtctgtcaatatcagaggaggtaggaatctggtacaggtatgaggatctgcgtctgtcaaagtctgaggagttaccatctggtacaggaatgaggagatgtgtcttccagtgacttaggaggtacgatctcttataggtatgaggatctgggtctgtcaatgtctgaggaggtaggatctggccctggtatgagaatccgggtctgtccatgtctgagcaggtaggatgtgtccctggtatgaggatccgggtctgtcaatttctgaagaggtgggaatttggtacatgtatgaggatctgggtctgtcagtatctgaggaggtaggatctggtacagttgtgaggatctgggtcttcgggtgtctgaggaggtggcatttggcacaggtatgagaatctggatcttctagtgtctgaggaggtgggatctggtattaattatgagaatctggttctgtcagtgactgaggaggtaggatctggcataagcatgaggatctgggtctgtcaatgtctgaggaggcagtatctggtacaggtatgaggatctgggtctgtcatgtctggaggtaagatctggcatgagtatgaggatttggttctgttcatgtctgaggaggtaggatctggtgcaggtataaggatctgggtctttcaatgtctgagaaggtaggatctggtacaggtgtgaggatctgggtctgttaatgtctgaggaggtaggatctggcactggtaagaggatctgcatctgtcagtttctgaggaggtaggatctggccctagtaagaagatctcagtctgtcaatttctgaggaggttggatctggcccccttatgaggatctgagtctgtcaatatctgaagaggtaggaatctggtacaggtatgaggatctgtgtgtgtgtcagtgtctgaggaattaggaatctggtacaggtgtgaggatcttcatgtctctgtatctgaggaagtaggatctgatacaggtattaggatctgggtctatgtctgaggaggtagcatctgatacaggtatgaagacctgagtctgtcagtgtctgaagtggttggatctggccctggtatgaggatctgggtttgtcagtatttgaggaggtaggatctgtccctggtaggagggtctgtgtcttctagtgtctgaagaagtaggatctggccctggtatgaggatctgggtctgtcagtatctgaggaggtaggatctcatacaggtatgaggatctgggtttttcaatgtctgaggaggtaggatctggcacaggcatgagcatctgggtctgaccatgtctaaagagttgaagctgtgtgcaggtatgaggccttgggtctgccagtgtctggggaggtgaggctgggcatgggtgtgagaccctgggtctgtccatatctgaggaggtaggatctggtatgagtatgaggatctgggtgtgtccgtgtctgaggaggtgggccctggcacaggtatgaggcctggggtctgtccgtgtctgaggaggtgggccctggcgcaggtatgaggccctgggtgtgtccgtgtctgaggaggtgggccctggcacaggtatgaggtcctgggtctgctggtgtctgcagagacagggcccgacatctcagggaagaccacggtaagctcttcagtttgtcttgtggctgtggtcagtcatctgtagtctgccctgttggtcttcccatgtgttgccagcacctgcctgctgccttgcttcctggaggtgggttgggccagggccctccgagacgcccctgtgcaagaccagggacagggtttccggcaggaggtggggggcggggtgtgccggccctccctcagcaccttgtcctgtctctcctagtgggtgggaggacgctactcgctgtggtcggccatcggactctccattgccctgcacgtgggtgagtgtgtttctgtgtcttgcagcccctgtgggagacagtgttgcagtctaaggtcggggtagggggcttgtgtccctgaacatcatgctgtcctcacaggctgctggcctctctgcagctggctgggatatttatttcatgtccagaaggaaggtctgggtttttttgcgtgtgcaagttggcccccgtctttgcccctcacaactgcagtcctgtttctctcctatcctaggcagagtcagatccctgcactcagggccacctctcactggaggggctttgtctaggtccgagtcctcccatgtcgtatcttctggctctccatgcagccttccttcgttgcagaaggagctgtgcccactgcccacaggacgcagggtgtggccacttctgttgactctgcttttgtgtcacaggttttgacaacttcgagcagctgctctcgggggctcactggatggtgagtgctgaggctggttctctgccaagtgctggccagaggcgcgtgtgttggtcctggtcccccgctttctcccccactgtcctgtccctcccctccccgtgcagctgctcagctcccactcatcctgctcctgtttcaggaccagcacttccgcacgacgcccctggagaagaacgcccccgtcttgctggccctgctgggtatctggtacatcaactgctttgggtgtgagacacacgccatgctgccctatgaccagtacctgcaccgctttgctgcgtacttccagcaggtaccagctgccaagccaggccttggagtcagcaagatttgtggggggtctgggaggtctaggaacctgggtttcagctcctccaggagctctttgccccattgcccttgggcctggccaaggtccatctgtgctccttgtctcaggatgaatctttgtaactgaggttggttccatttgagtgtcatctgagtttgatcaccatgggaggggcatgactggtgatcatggtgccctggctagggaggtcctggcttgactcaggggatgtttctcagctggggtcacttctttcttgcacatcactatgcatgcctaccatagtgtctgaggacgtaggatctagccctggtatgaggccctaggtctgttagtatctggggaggaaggatctggtacaggtatgaggacctgggtctgtccatgtctgaggaggtgggatttggccatagggtggggctgcaagctggaatcccttatagcctgcactgcctttatccctccagaaaagcaagtgtgtatctagtctgtggtggcctctttggactacatggccctcttctcccttgggatctccagagccccccgagaggcttagcaggccctctcctagtcacattatgtcccagaaagcttttccacacctgtccctgcttttttttttttgaacagattctcactctgtttcccaggcaggagtgcagtggcgcgatctcggctcattgcaacctccgcttcctgagttcaagcaattcctgtgcctcagcctcccgagtagctgggattgcaggcatgcaccaccttgcctggctaatttttgtatttttagtggaaacggggtttcactatgttgcccaggctggtttcgaactcctggcctcaagcgatccacctgccttggcctcccaaagtgctgggattacaggcatgagccaccatgcccaaccctatccttgcttttgtttagtacaaagccagtccctgtccagcagctcttgagttgctctgggcaggtacagaaggcttcaccaacacctggaagcaaatcctgtgactgaaggagaggccaaggttccccaaatcccagctgccttggtgagggttgccatgaccagggcccaggtgggtacccaaagcctagcatttagttgtggtgacagccctcaaaggctgtactcttagccaggcatggtggctgatgcctgcaatcccagcaccttgggaggcagaggctggggggaattgcttgagcccaggagttcaagaccagcctgggcaacgtagtgaggcccggtctctacaaaaaaaacccacaaaaactaacagtagccaggcatggtggtgcggcacctatagtcccagctacttgggaggctgaggcaagaggcttgcttgagcccaagaggtcgaggcttcagtgagcaatgattctaccactgtactccagcctgagtgacagagtgagactctgtctctttgggaaaaaaagaagctgtgcactctggaccccagcctgctctcccttaagaaatgagctgattttgtgaccgattttgtctttagggaggtccttgcctgacctccagacccaccttttcctgggcatgagtccttcctgcacagtggcttaagcaggaaaggttgggaggctgtgtcctcactggtgtggggaggaaggggatcgtgcctgtggacacgtgtgcaggtccacctcacggtgtcagggcagggtgggtctgcctggagcatctgggcaggactttggcatggtgcaggaaggagcaggatttgcgtacagtgtgtgaaggatcaagacttgcaggaagagggttgggttttttttctttcttttcctttcttttcctttttttttttttttctttttttttgagttggagttttgctcttgttgcccagtctggagtgcagtggcatgatctcggctcaccacaacctccgcctcccgggttcaagcgattctcctgcctcagcctcccaagcagctgggattacaggcatgcgccatcacacctggctaattttgtatttttagtagagacagggtttctccatgttaatcaggctggtctcaaacttccaacctcaggtgatccgcctgccttggcctcccaaagtgctggaattacaggcttgagccactgcgctcagcctctttctttctttttaaatgttctttcattttgccaagaactgggtttctgttccttttccagggcgacatggagtccaatgggaaatacatcaccaaatctggaacccgtgtggaccaccagacaggccccattgtgtggggggagccagggaccaatggccagcatgctttttaccagctcatccaccaaggtaggcccctgtggcctgggaagggtgatgttgggggagggaaaggatcttccagaagagatatctcacttaggtcagtgccctcctctaggccatatggctagctcccatgggctggggtcatgtgggtgaccacagtgcccttcacaggcaccaagatgataccctgtgacttcctcatcccggtccagacccagcaccccatacggaagggtctgcatcacaaggtaagagcccccatctggccccatctggggggtctggctcacattgcacccagacctctgaaaacctggtgcattggttggcaatcacgttagttttctattcctgccgtaacaaatgataacaaacatggaggcttaaaacaacactcttcttttgtggggtggggaggggggacagagtcttgctctgtcgcccaggctggagtgcagtggcacgatcttggctcactgcaaccttcccctcccggcctcaagtgattcttatgcctcagcctcccaagtagctgggactactggcactcaccaccatggccagctaatttttgtagttttggtaaagggggggtttcactatgttggccaggctggtcttgaactcatgacctcaagtaatctacctgcctcggcctccctaagtgctgggattataggcatgagccaccttcctgggctatctgaagagtttctgaagctcaaatatccagcaggccctgatgtgtctctgcttagagtcttgcaggctgaaatcaaggtgtcatcaggactgtgtttctttctggagaccttaggggaaaagcctttgacctgcttgtcaggtggttggcagaattcatttctctatggttgtggaactgaagtccagcttccttgctgtgggctgaaggtcgttctcagattctcagaggtcacctgcatcctctagcttgtgggcctcttcactgcagaaccagcaatggcaggttaaatccttctctgaagctttgattctgtcttgccacttctgttgcatctctctgacttgtttaccttcctcttctacattttgcttttgttccctaagtgacagtgtcatgctgtgttgtctaggctggacttacagtggcatgatcacagttcactgtattctcaacgtcccaggctcaagcagtcttcctgcctcggcccctcaaatagctgagacttacaggcactaacaggcacttacaggcacttacaggcactaacagcctggctaactgttaaactttttgtagaggccagatttcactatgttgcctaggctggtctccaactcctgggctcaagtgattctcctgcctcggcctcccaaagttttgggattacaggcatgagctaccgtgcctggccctcttttacttttaagggccagtgtgattagattggggctactagataatccaggaaaatctccccttttgtttattttatttatttattttattttagagatagcatgtcactctgttgctgaggctggagtgcactggcccaatcatagctcactacagccttgaactcctgggctcaagcaatccttttatctcagcctcctgagtagctgggaccacagatgtacaacatgcctggctaagtttttttttttttttaaagagacagagtcttgctctgttgcccaggctggggtgcagtggcacaatcaggctctctgcagcctcaccctcctgggctcaagcaatcctcctacctcagcctcctgagtagctgggaacaggcacacgccaccacacccagctgatttttttatttttattttttgtagagatggagtctcagtatgttgcccaagctgccctcgaactccttcagagaatttactgtgctttgtctcaggtgtgcagagcagcacagggttacggtagcacaatcttgggagtcagtgagctggattgaattctgattgttcctgtctatagttctgtgatccagcactgtggacttgtggaacccaaggctctactagaacagggcgatgatgcctttcctccttaggatcttagtattatttttttttcgagacaccgtttcactttgttgccccggctggagtgcagtagtgtgaccttgactcactgcaacctcagcctcctgggttcaagtgattctcgtgcttaagcctccggagtagctggaattacagttgcacaccaccacgcccagctaccttcttaggatcttaaaagatagatgttggtaaaattgtgagcaggacccctagcaagtggtgtgtagttctttttttttttttgagatggagtctaggtctgtcgcccaggctggagtgcagtggcgtgatcttggctcactgcaccctctgcctcccaggttcaggtgattctcctgcctcagcctcctgcctgatgacaggcatgcgccaccatgcccagctaaatttttttttggtatttttagtagagacgggtttcaccatgttggtcaggctggtctcgagctcctgacctcgtggtccatccgcctcggcctcccaaagtgtcgggattacaggcgtgagccaccgcgcctggccactggtgtgtagttcttaaagagcagttatcactgttccctgccttgtggtgtcatcggatgtgtccccctcgctccaactgagctgtacagcgagtgacccaggctgggactgacccctgctgagaagtaccaggcggtcttgtccctctgcctgaagcccagacagtgctctcaagcataactgatgtctcgctcatcagatcctcctggccaacttcttggcccagacagaggccctgatgaggggaaaatcgacggaggaggcccgaaaggagctccaggctgcgggcaagagtccagaggaccttgagaggctgctgccacataaggtcagcacttctgcatttggctttggggtgcatgctggagttggaggtgtgaagctatggcaccaggcaggggcttggggcgtgcctggcttgtcctacagaatgggagggcctgtcctcacagacctgcacgtctcagcctctggggcagggtgtgcttcccttcaaggggtttagggatcaggactctcttggagacattccttggtgttttctgcaggtctttgaaggaaatcgcccaaccaactctattgtgttcaccaagctcacaccattcatgcttggagccttggtcggtgagtgagtaggggaaaggtcctggcttggggtaggttggaatgggcttgtggagccctgatgtgccctgtctgtcacttctgcagccatgtatgagcacaagatcttcgttcagggcatcatctgggacatcaacagctttgaccagtgggggtgagttgctcacttaggggagggccgggaatacctttgtgtcggctcagggatttcagtagcaacgttagagccttcctcataccactcttcccttcccttcccttcttggcagagtggagctgggaaagcagctggctaagaaaatagagcctgagcttgatggcagtgctcaagtgacctctcacgacgcttctaccaatgggctcatcaacttcatcaagcagcagcgcgaggccagagtccaataaactcgtgctcatctgcagcctcctctgtgactcccctttctcttctcgtccctcctccccggagccggcactgcatgttcctggacaccacccagagcaccctctggttgtgggcttggaccacgagcccttagcagggaaggctggtctcccccagcctaacccccagcccctccatgtctatgctccctctgtgttagaattggctgaagtgtttttgtgcagctgacttttctgacccatgttcacgttgttcacatcccatgtagaaaaataaagatgccacggaggaggttgtaggctcagcctctgattttttttttcctgtgatggtgctttatgtagcagagggcaggagcgctcagcaggacgcaggctgtgcctctgcggacacttaacactaagtggtgagcgggtctagagtggagcaaggtgccctgagaagacaatagtggggtgggggcacaatcagtcaggacggcaacttggcctgtgtcaccaaatcccaagactgttttccactcctcacctctgtgactgcagaaattggatactctgttcactcgatggttctaaaaactgcattgagattatgtttgtttcgggtgaattcctggacaagaccgaggatgactgccatctcctggcaagacgctcaggtagttcttttgctttaaaaggcagatattgaaaactggaattttttttttttgagtctcgctctgtcacccagactggagtgcagtggtgcaatctcggctcactgcaacctccgcctcccgggttcaagctattctcctgcctcagcctcccgagtagctgggattacacggcgcacaccaccatacccagctaatttttgtatttttagtagtgaaggggttttaccatgttgggcaggctggtcttgaactcctgacctcaggtgatctgcccgcctcagcctcccacagtgctgggattacaggtatgagccaccacgcccggcccattttttttttttttttgacaacttttttttttttttgagacagggtcttgttccattgcccagactggagtgcagtggcatgatcacagctcactgcagccagtaatcctcttgcctcagcctcccaagtagttgagactacaggttgtaccactatgccctgctagttttttcattttttgtagagagacgggtcttttttttttttgagacggagtctcgctctgtcgcccaagctggagtgcagtagcacggtctcagctcattgcaagctccgcctcccaggttcacgccattctcctgcctcagactcctgtgtagctgggagtacaggcacctgccaccatgcccggctaattttttatatatttttttagcagagacagtgtctcactgtgttagtcaggatggtctcgatctcctgacctcgtgatccgcccgcctcagcctcccaaagtgctgggattacaggcgtgagccaccgcgcccagcaaggcgggtcttgctgtgtttcccagactagactggtcttgaattccagggctcaagagatctcccacctcagcctcccacagtgctgggattacaggcgtgagccgccacacccagcctattcaaaatttttttttcttagagacagggtctttgttgcccaggctggactgcagtgatacaatcatagctgactgaagcctcaaattcccaggctaaggtgatcttctcacctcagccttccaagtagctgggtccgcagatgcatgccagtacacccagctcatttaaaaaaaaatttttttcttttttgagagtcttgctttgttgcccaggctggagtgcagtggtgtgatctcggctcactgcaagctccacctcccggcttcacgccattctcctgcctcagcctcccgagtagctgggactacaggtgcccgccaccacacccggctaattttttgtatttttagtagagacggggtttcaccgtgttagccaggatggtcttgatctcctgacctcatgatccgcctgctttggcctcccaaagtgctgggattacaggcgtgagtcaccgcgcccggctcattttaaaatttttgtagatcagtgtactgttgtaaaaaaaaaaaaataagaaaaataaaaaataaatttttgtagtgataggatcccactgaggccagagaatagggtctggagacaaaggagcattcacttcagcctctgactggtggcaggccaagtctttatttacatagggtgtaaccaaataggaaacctctaaagggtacttaaaccccagattttctacacagggcacttgcttgagcctcatcccgctttctggaatgtacttttgcttcaataaatctgtgcttttgttccttcttttgttgctttgtgtgttttgtccacctctttgttcaatattccaagaacctggacgacttgtagtcaagatcctcccctggtaatactactgtgttgcccaggcttatcttcaactcctgggcttaagagatcctcctgccttggcctccgaaagtgttgggattacaggcgcaagccactgtgcccagcatcacagggccttttaaagctatcaggatgaagtgtggtaaaaaaaggagtaaatgggtttcatctccagatccttgctgggctagagccaaacctcacaaaggctggtgcttcctcctttgaggtgtaaatccttgaaaacattcatttcttttgcataccacgttatgaatcctaaaataatgtttttgcagcctgcatttttaaaaagtcaggtttattggggtgtgatttacatatagtaagattcacctttctttggtatacagttatgagttttcacaagtgtatatacagtcttagaaccattacagatgagatatacagcattttcctcaccctcaaaagttcctgacacttgtggtccagtcctactccctcatcccaactcctgactaccattgaactgatttttttccctccgaagttctgcgtttaccagaatggcgccttttgtgtctggcttcttcccatgatgcttttgaaattcacccatgttgtgctgcaggaattgaaaaaactgtattgtgtggctgggcgcggtggctcacacctgtaatactaacactttgggaggccgaggtgggcagatcacttgatttcaggagctcgaaaccagcctggccaacatggtgaaaccccgtctctactaaaaatacaaaaaaggccgggcatggtggctcacgcctgtaatcccagcactttgggaggccaaggtgggcggatcacctgaggttgggagttcgagaccagcctgaccaacatggagaaaccccatctctattaaaaatacaaaattagccaggcatggtggcacatgcctgtaatctcagctactcgggaggctaaggcagaagaatcgcttgaacctgggaggcagaggttgcagtgagctgggatcacgccagtgcactccagcctgggcgacaagagcgaaactccgtctaaaaaaaaaaaaaaaaaaaaagccgggcgccgggcgtggtggtgggcgtctgtaaccccagctactgggtggggctgaggcaggagaatcacttgaacctgggaggctgagatgcagtgagatggcgccactgcacttcagcctgggcgacccagcaagactctgtctcaaaaacaaaacaaaacaaaacaaaaataaaaactgaaaaatctcaaacatataaaacccaaatagaataaatctccatgtgcctggcaccaaatttcaacaattatcaactcatggtcaatcttactgtatttacaccccaccaccttaattatgtagtagcaaatcggaggtatttcatctataagcattttggtgtgtttctctaaaaattaaaaactttaactttttaaaaaactttattgttcttgttaatgactgataataccattatcccacctaaaatttttattttccgggaaggcttttttctggtggctcacacctgtaatcgcaacactttgggaggcggaggcgggaggatcgcttgaaccccaggagttcaagaccagtgtgggcaatatagcaagtcctcgtctcaggaaaaaaaggaaaaaagaaagttagctttttggcaaaactacttcctagtagatggtgtgtacttcctatcacagcgcattaaggggcacataatgcctgggactccgggatttcgagcccctgacgccagcggcgcctctgtggctctgggacctgagcgcacgcgccttaaagccacgcctccgcatcggatcctagtaagggagcggggttatcattttagcgtagcgttgcgcgtgcgcagagaggccgccgtagtttgcgttttcacctggtcgcccggcggccatggcggccgttctgaagccggtgctgctgggccttcgagatgcgccggtgcacggcagccccacagggccgggtgcctggactgctagcaagctgggcggcattccggtgagggcgggtgccggagctggggtcgatgggtgctgctgaagggtgcggagggagtgggcgaggtcctggggggagtcggggtctgagcgcctcctctgtcccctcaggatgctctgcccaccgtggctgcgcccaggcccgtgtgtcagcgctgcgggcagccgctcgctctggtcgtgcaggtgtattgcccgctggaaggctccccgtttcaccgtctgctgcacgtgttcgcgtgcgcctgccccggctgtagcaccggcggtgcgcgcaggtaggcggggaagtcccagagctgctccaggggtgtcctttccagcgggctggggcgggccggcgggctggagtcggggtgcagccctcacggccctttgtcttcaccccgaagctggaaggtgttccgctcccagtgcctgcaggtgccagagagagaggcgcaggacgctcaggtaaaggttgtgattggcatgttattgtttttctgtcatttgaggatattttccagagaatagtttggggcagactttaaagccgtgttctttgaagtacactggagtgttttttgcttttctgaagaaccataaaatgctattttcgtaaagtttttttttttttttttttttgagacggagtttcgctctgtcgcccaggctggagtgcaatggcgcgatctcggctcaccgcaacctccgcctcccaggttcaagcgattctcctgcctcagcctccctagtagctgggattacaggcatatgccaccacgcccggctaattttgtatttttaatagagacggggtttcgccatggtggtcaggctggtctcgaactgccgacctcaggtgatccacccgcctcggcctcccaaagtgctgggattacaggcatgagccaccgcgcccggcctttcttaaggttttgtgagagttttttttttcttctattttactttatttttattttctaactcctttgttaaaaggagatggaggcccagcatggtggctcacgcctgtgatcccaccgttttttgagaggctgaagtgggaggattgcttgagctcagaagttggagaccaggctgggcgcggtggcttacgcctgtaatcccagcactttgggaggccgaggcgggcggatctcctgaggtcagaagttcgagaccagcctggccaacatggcgaaaccccgtctctattaaaaacaaaaacaaaaaattagccgggcatggtggcagacacctgtaatcccagctacaagggaggttgaggcaggagaatcgcttgaacccgggagacagagattgcagtgagctgagatcatgccactgcactccagcgtgggtgacagactccgtaaaaacaaaacaaaacaaaacaaaagaaaaaaaaaacgttgggagagcagtctgggcaacatagcaaaacatcgtctctataaaaagtaaacaaattagccaggcatgatggccacgcaactgtagtgccagctactcaggaggctgaggtaggaggattgcttgagtctaggaggttgaggctgcagtgacctacacttgtgccactgcactccggcctgggccacaaagccagaccctgtcccctgccaaaaaaacaaaagggagatggagacttcctcctggatttcttcaacttttttttttaactgtaaattgacagtttataataatgtataaatttatgaggtataaagtgatggctatgattcatgaatatcatgtggaataattaaatgaagctagttaatgcattcatcacctcaaatacttaacatcttgtgagaacatttgaaatttcctctagcaatttggagatacacaatactcttatttttttttttttttgagacggagtcttgctctgttgcccaggctggagtgcagtggcgccgtctctgctcactgcaagctccacctcctgggttcacaccattctgcctcagcctccagagtagctgggaccacaggcgcccgccaccacggccagctaattttttcatttttttaaatttttagtagagacagggtttcaccatgttagccaggatggtattgatctcgtgaccttgtcatccacccacctcggcctcccaaagtgctgggattacaggcttgagcccctgtgcccagccacaatactctattattaactatattcatgctgtgcagtagaacttaaaaaaaacccacattcctcctgaataactgaggttttgtattctttgaccgtcatctccttattcttcccgctccaggtttctttcttcctttttttttttttttttttttttgagaccgagtttcgctcttgttgcccatgctggagtgcaatggcacaatctcagctcactgcaacctccacctcccggatgcaagcgcttatcctgcctgcctcagcctccctagtagctgggattacaggcactcgccaccacgcccagctaatttttatatttttagtagagaaagggtttcaccatgttggccaggctggtcttgaactcctgacctcaggcaacccacccgcctcggcctcccaaagtgctgggattacaggcgtgagccaccatgcccggctcactccagatttttttttttctttgagatggagtttcgctttgttgccaggccggagtgcagtagcacaatcttggctcactgcagcctccgcctcccaggttcgagcaattctcctgcctcagcctcctgagtacctgggactacaggcacacaccaccatgcccagctaatttttgtatttttagtagagatggggtttcaccgtgtagccaggatggtgtcgatctctttacctcgtgatccacccgccttggcttcctgaggtgctgggattacaggcgtgagccaccacacctggccactccagatttctttaaccaccactctactctctacttctttgaggttgttttagattccacatataagtgaatacatgcagcatttgtctttgtgtctggcttatttcccttagcaaaatgttctccagttccatccatgttgtcacaaatgacagaatttcctttttttttttaagggtgaaaaatattccattgtatatatagtagtttttttaaacttacactgaaggtcttgagacacacagtttactgattttcctgtttgggaatatatatgggtgtgtacatatatgtggttgtatgtgataatgtatacgtgtctttatagtaaatatactttatgagagctatatatgtattaacacatttcataagatgaaatctgaatttattgaaaaggcaggcaagttggtagctgcagaacacaatttagcctccctttgactgtaaatgtgtctttatatatacactgagtttgtttgtttgtttgtttgttttttgagatggggttgcattctggtcacccaggctggagtgcagtggcatgatctctgcctcttgggcccaagccattctcccacgtcagcctcctgagtagatgggattacaggcacgtgccaccatgcccagctgattttcatattttttgtatagatgggattttgtcatgttgcccaggctgttcttgaactcctggactcaaacagtccgcccacctcaacctcccaaaatgctgggattacaggcgtgagacactgggcccggcctgcacccagttcttgatgtttgctaggcatagtattagcagtacttaaataaaaagttgaagacagtggtgtttgcctatatttgtcagggttcaggtgcagataattagaaaagtgctgttgctttttctttttttttttgagaccgagtgtcgctctgtcacccaggctggagtgcagtggtgtgatcttggctcactgcaacctccgcctcccgggttcaagcgattctcctgcctcagcctcctgagtagctggattacgggcacgtgccaccatgcctggcttttaagctgagacagacttaacacaggagtgaggtttttagtaagtggataggctgaaggaggaggctccaggaatgccctccagaatcacacctcagaactggccgtgaaggagctgctatgccacctctcctgctgtcaggaagcttaggtgtgatctggtgaactagaggctgtctttgccaccgaaccgttggctccaaagccttgttctgtctgtgtctacacaatggctaccttttgctatgtggtctttctttctacttcactctgtctcaagttcatgtttctctctagtagacctgattagcagacccctaatcatatctgaaaccctagctgctaaggggtctgggaaaggtagttctttcttttcagttcctgcaatacatgaagcacaacagaaagatattggaacggatggttgaataacccctgtactatatctgtcacactcaccccaaaaaggaaagacaagtattttaagtcacctccaacgtgcttttgagtacatagggtctagaaagtttgattggagtgtaccagaggggaaggggatggtgtgaaggctccctctggaaggcgcggcggtgggtggctggagccgaaggattagaataaacctcccaaatgtgctcggacctcattcactgagtatttttccagaaacagggaaacagccttgcagctgaggactggtgtgaaggtgctgatgactggggaagtgatactgaggaggggccttcaccacagtttaccttggattttgggaatgatgccagcagtgccaaagacgtagactggactgctcggctccaagacctccgcctgcaggatgctgtcctgggtgctgcccatcctgtgcctcctgggctgccgctcttcctgccctactacatctgtgttgcagatgaggatgattacagggactttgtcaacctggatcatgcccacagccttctgagggactatcagcagagagaaggcattgccatggatcagttgctttcccaaaggtgaggatgtgtgctgctgaggttgagaggtgactggattgggaagcagccacaagagttacccttcagtttcaccacaggacctggggaaactttcaggcagaacttgtatgtaggacctttttgcttcacttccttatcagccaacttgagttagcttgaaaaccctgctctatttataattgccgttaagaaagtgaagatgaacaaacagaagttagagatggcaagtatttatagaagacgcgttcactgactcttaaattttcttttatatttctaatatgtctttatagcagagacaggcaagttagaaaactaccatttgatctgggataataagattggggtgaaaaaatggaaaaaggaaaagaaaaacgccatttgtttattgactcttggctgtggctccagaactggcccaggacctcagagatgctttcagatcctcaattctgtaaaatgagagtgatggtgatatctctgttctctgtttcatcccatgattttttgagagttaagcgagagggtagatcttgaaaggctttataaaccaaagctctctaaagaggtaagaatgatcatttttgcttattgattgactgagagagacagggtctcactctgtcacccacgctggagtgaattggtgtgatcaaagctcatgcagccttgaactcctgggctcaggcaatctatcttagtttcccaagtagctgggagtacaggtgcacaccaccatgtctgaccaattaaaattttttgagtttcgctgttgttacccaggctggagtgcaatggcacgatctcggctcactgcaacctccacctctcaggtttaagcagttctcctacctcagcctcccaagtagctgggattatagccatgtgccaccatgcccagctaatttttgtatttttagtagagatggggtttcactatgttggtcaggctggtctcgaactcctgacctcaggtgatccacccacctcagcctcccaaagtgctgggattacaggcgtgagccattgtgcctggcctaaaaatttgttttagccactgcacccagcattttttactattagaataaaaaaattacaatagaatatttggagaaatggcctggttctttaccagaactgtttcatttgtaggctttttcagaataatgatgaaggggaatgcatgaagacatgttggtgtttgaaaataatccttaatagaattgatggttataaggactttttattttttatttatttatttatttatttatttatttatttttgtgtgtgtgtgatatgggctctcttgccaggctggagtgcagtggtgcgatctcggctcactgcaacctccccttcctgggttcaagcaattttcttgcctcagcctcccaagtagctgggactacaggtgcgcgccaccacacccagctaatttttgtattattagtagagacggggtttcaccatgttgaccaggatagtctcaatctcttgacctcgtgatccacctgccttggcctcccaaagtgccgggattacaggtgtgagccaccgcgcccggcaggattttttattttttaatttcttaagtttttatgtatttgcttatttttggtgggtttcttcagactagagtattcttcttttttttttttttttttttagagatgggatcttgctttgtttcccaggctgaactgcagtggtgtggtgtggttatggccttttttttttttttttgagacagtcttgctctgttgcccaggttggagtgcagtggcacgttctcggctcactgcaacctctccctcgccggcttaagcagctctcatgtctcagcctcccgagtagctgggaccataggcgtgcgccacttcacccagctaatttttgtattttctttttagtagagatgggcttttgccatactggccgggctcttcttggagttctggccccacgtgatccgcccacctcgacctcccaaagtgccgggattacaggtattagccaccacgcccagcctgctcatggtttactgcagcctcaaactcctggcctcaggggatcctctggcctcagctttccccatagctgggactacaggtgtgtgccaccaaactcagctaattaaaaaaatttttggtttttttgagacagagtctcactttgtcacccaggctggagtacagcggtgtgataatggctcactgcaacctccagctcccagtttcaaatgatcctcctgcctcagcctcccaagtagctgggattacaggtacccgccaccacacccggttaatttttgtatttttagtagagatggggcttcaccatgttggccaggctggtctcaaactcctaacctcaagtgacccactctccttggcctcccaaagtgctgggattgcaggcgtgagccaccgcacccagatgaaaaatacatatatatatatatatatataaaataaataataaaatatatatattaaaaaatatatatgaaaatatatatatttgagacagaatctcgctctgttgccaggctggagtacagtggctcaatctcagctcattgcaacctccacctcccaggtttaagcaattctcctcccttagcctcctgaatagctaggattacaagtgcataccaccatgcccagctaatttttgtatttttagtagagacagggtttcaccatgttggccaggatggtctcgatcttttgacctcgtgatccacctgcctcggccttccaaagtgttgagattacaggtgtgagccactgtgccctgcgactttttaaattgtaaataattactcaagagttgaaaatggcttgggagaagggttgggcagggaactgcagagctacatgtacacaatttaaatatcaaaaatatttacttgacagtttttggctgagtgcggtggctcactcctataattccagcactttgggaggccgagatggatcacttgaggtcaggagttggagaccagcctggccgacgtggtgaaaccttgtctttactaaaaatacaaaaattagctggacgtgttggcgcacacttgcaatcccagctactcaggaggctgaggcaggagaattgcttgaacccaggaggtggaggttgcagtgagccaagattgcaccattgcactccagcctgggtgacagagggagactccctctcaaaaaaaaaaaaaaattacttgacagttttacagttttttaactttgacagtttttttttttttttctttttgagacagggtctcacactgttatccaggctgtagtgcaatggtgtgctcacggctcaccacagccttgcctctggaatagccgggaccacaggtgcatgccaccatgcccagctaatttttgtatttttttgtagagacaaggttctgccagattgcccaggatggttttgaactcctgagctcaagtgatccgcctgcctcggcctcccaaagtgctgggattacaggcgtgagcccactgcactggcctgagaaatttttttttgagacggagtttcactcttcttgcccaggctggagtgcaatagcgcaatcttggctcactgcaacctccatctcctgggttcaagtgattctcctgcctcagcctcccaaggagctgggattacaggcgcccgccaccacgcctggctaattttttgtacttttattagagatggggtttcaagatgttggccaggctggtttcaagctcctgacctcaggtgatctgctcacctcggcctcccaaagtgctgggattaaaggcgtgattgattttttttttttttttttttttgagatggagtctcattctgtcaccaggctggagtgtagtggcatggcacgatctcggctcactgcaacttccgcttcccgggttcaagcgatttcctctgcctcagcctgctgagtagctgggactataggcgcaagccaccatgcccagccaattttttgcattttttagtagagatggggtttcaccatgttggccaggatggtctcgatctcctgaccttgtgatctgcctgcctcggcctcccaaagtgctgagattacaggcgtgagccactgcgcctgccctgataaaattttttaaaagaaaattatcttgttttgtcttgcaaatgctgtaattttctggatatagacattcaaaagtgttttctgcttctgtttttagccttcctaatgatggtgatgaaaaatatgagaagaccataattaaaagtggagatcagacgttttacaaattcatgaagcgaattgctgcttgtcaggagcagattttgaggtaaaaaaaggcacagttccttttattgttttccttgattataaaggaatacatattagtttggaaaacacaggaaaatatgagaaaagcaaaacctacagtattccccaaaccaagagagaacctaatacctgctttataggacctaatacctactttataggatgtgtaggaggattcagtaaggtaaagtgcactcacttgtctaacaaatacttacgaagtctattctgcatgccagttgctggtatttgtaggtgctgcagatatagcaagaaacggcacagatgaagtccatgttctcatagcctttattattattattatttaatttttttttttctttgagagggagtcgcgctctgtcgcccaggctggagtgtagtggcgtgatcttggctcaatgcaacctccacctcttgggtttaagccattctcctgcctcagcctcccaagtagctgggattacaggtgcccgccaccctgcccagctgatttttttgtattttagtagagatggggtttcaccatgttggccagactggtctcgaactgctggcctcacgtaatctgcccacctcagcctcccaaagttctgagatacaagtgtgagccaccatgcctggcttttttttttttttttttttttttttttgggggcagggtcttgctctgttgctcaggctggagtgcagtggtgtgatcaatcatagctcagtgcaccttgacctcctgggctcaagtgatcctcccacttcagcctcccaagtagctgggactacaggcatgtaccaccatgcccaactaatttttgtatatttttttagaaatggtatttcaccatgttggccaggctggttccaaacttctgggttcaagccatccacctgccttggcttcccagagtttgttctaggattacaggcatgagccactgtgcctggactattattattattaaaaaaatatttttttagagagagggtctcagtctgttgtccaccctggagtgcagtggcgtgatcattgctcactgtaacaactacctcttgggctcaatcgatcctcccaagtagctagaactacaggagtgtgccaccatgtttggctaatttttaaaaaatgtattttgtagagatgggatctgatcatgttgcccagtctgctctcaaactcctggcctcaagtgatcctcctgccacggccttccaaagtgatgggattaccggcatcagccacgacccttggcccatatatttatttttattttttaatttatttttatttttctgggatggagtctcgccctgccacccaggctggagtgcagtgacgtgatcctggctcactgcaatctccgcctcccaagtttaagagtctcctgcctcagcctcccgagtatctaggattacagcgccaccacgcctgactactttttgtatttttagtggagacggagttttaccatgttggtcaggctggtatcgaactcctgacttcaaatgatctgcccgcttcagcctcccaaagtgctggagttacaggcttgagccactgtgactagtgggggagattaaaaacaaacctgtatgattcccataagtgataaatgaggaaaaaatagagctattttaggtaggctatcagaaaggcctcagaggaaatgacatacccagcaggtataatttataaaaatagccacatagtaaaaacaggtccagacaaagtgggcagaattagctcaaatggtctttttccccgatacctaccacagtgaatctaaaagctaaaaatcaggccaaataaaataaatattaaaaaagaaattcccttgtatcagcactgaacaaaggaaaagggcttagtaccataaaactcaaagtgatagcccaggatataatatccataaatgtctagtagagttcttgagtgtttaacatatatatttattcacttatgtaactaagttatctttgcagagaaaggtacagaaatttccggcatggttaagtgcaagttctaattccacaggccttttctctcacctgcctaaaatatactgatgagtccacaaagaattttcttttttcggaaacggaatctgtctctgtcccccaggctggagagcaatggtacgatctcagctcactgcaacctccattttctgggttcaagcaattctcctgtctcagcctcctgagtagctgggactacaggcatgtgccaacatacccggctaatttttgtatttttattagagatgaggtttcaccatgttggccaggatggtctcgaactcccgacttctggtgatccacccacctcagcctctgaaagtgctgggatggcaggtgtgagccaccatgcccggcctaagaattttcagttaataatattatgtctggaaggaagcacacaggaggagagtttgcatctcctaatgtggaggatggtggacccagctgttggctgaagaactgggtgtggtggggaggtggtgtaggaaaggacggggattgcctctcagaagcaacattcctttgttccatgagtcagagcaatgattggaaagttaagagcaatttcgcctccattcgagtgggatctttctcaacatacagcattttacactgtctcagaggaaaaagcaaagcccaggtattctaataaagattgcatccagtcccagaagaactatctcctcaccccagtttcctcttttaccacctacagaaatgtagaggaaatggacagtactcttagagagaggaaaacaggcctcatatgagatggacaggaaatcaatgagaacctctgcagacatttcagagcaaatagatggtcttaactgagttgccccctttaggtgtgagctagatgaaaaatagcatgccacccaggtaatcatactgtggcaagaacagttaaggaaatgaagagaacatagaaaaggctcaagaaccaagtctgccagaaaatataatccagctggactcggtggctcacgccagtaatcccaacactttgggaggccgaggcgggtggatcacgaggtcagtagatcgagaccattccagccaacatggtgaaaccctgtctctactaaaaatacaaaaattagccgggcgtggtggtgggtgcctatagtcccagctgttcaggagactaaggcaggagaatcgcttgaacctgggaggtggaggttgcaatcagccgagatcgtgccactgcactccagcctgggtgacagagtgagactctgtctcaaaaaataaaataaaataaaatataatccaaggagcacatcagtcccagcagatgcttcaaaatgtataagaacttcataagaatggattccataaaacaagagctcaaaggtgagaaaataaagtaactatgtatgaatcggaaattgaattgctaaagaaaccaagccccatgacattacatatctaatacatatagaatataaggaacactggccgggtgtggtggcttaagcctgtaatcccagcactttgggaggccaaggcaggcagatcacaaagtcaggagttccagatcagcctggccaatatggtgaaaccctgtctctactaaaaatacaaaaattagctgggtgtggtggcgggtgcctgtagtcccagctattcgggaggctgaggcagaagaattgcttgaacctggcaggcggaggttgcagtcgaccgagactgcgccattgcactccagcctgggcgagagagcaaggctttgtctcaaaaaaaaaaagaaaaaaaaagttaaggaacataatagacttggctaaagatcaaagtactggtatagaggaaagacttgagctaatccagtgaatgcagaagaaaaagagaaagcattcagagagaagatggtatctttgaagggttgataaatatatttactatgaggagaattggtgtccaaaatagagaacgcaatagatggatcagaaactattcaaagataaaattgggaatttttccttaatgaaataagaactaaatatgcaaatactaaaatacagggagtataagaatagttgacattgagaaacctagcctggtggtggttttaaaaatatcgtcagtcttttaaatgtagccattctagtaggtggtggtggtggtatttccttgtggtttgaatttgcattttcctaataacaaatgatgttgtgcatctttccatatactcatttgacatctgtgtatcttctgtagtgaagtgtgtctgtttacatttatttttcagcagctttattgagatacaattgacatacaacagactgcgtatatttttacagtgtgcactttgataagttgacatccatatacacccctgaaatcacaacagtcaagacagtaaacatattcctctctgccaggagtttcctcatacttcttcgcaagttcttgcctaccctgtcctgtgctgctcccctagtccccaggcaaccgccaatcatctttctgttgcaccttagtgcatttcctgtgaaagtatataaggtcatatgggatatactttttttttttggtctggttttattcacttagaatacttcaagattcattcttattgcatgtatcaatagttcattccttttgaccgctgtgtcgtattccattgtatggatgtgccactatacatttaccagttgatggatatttgggttatttccagtgtttggctattataaataaagctgctgtgaacatttgtttacatctctttgtaagacatgttctgattttgggggggtagatacctaggaatagaacggttgtattatatgggatatgcatgtttaacttgttaagaaacaggccagttttccaaagtggttatgccatttctattcccactagcagtttttaagaattctacttcctgtatatctttgctaatgcttgggatgttcagtttttaattttagccatttaagaaggtgtgtagtggcattttattgtggctttaatttgcatttccccaaatggcaaatgatgttgagcatcatttcaagtgcttgttttccatctctgtatatcatcttggataatgtgtcattcaaatctctcaccatattgtttgtgttactgagttgtaggaattcttcatatggtcaagagtacaagtcctttttcaatttaattttttttagcactcaaacagattctgacagatggctttaaattttgatcaagttcaacttaacagttatggtttttttaacacggaatatgcagtccctttaatgtaatcattggtattgttgggttaattgttttttgttttttgttttttttttcttgagacggagtcttgctctgttgcccaggctggagtgcagtggcacgatcttggctcactgcaacctctgcctcccaggttcaacgattctcctgcctcagcctcctgagtagctgggattactggtgcgcaccaccatgcctggctaattttttgtagtagagacaggtttcgctatgttggccaggctggtatcaaacttttgacctcaggtgacccgcctgccttggcctcccaaaatgctgggattacaggcatgagccaccgcaccccaccatgttgggttaattttattctgttattgttttttcctccatttccttttttttttttttaaagagatgggtgtctcactatgtggcctaggctggtcttgaactcctggactcaagcagttccctcacctcagcctctcagcttctcaaagtgctagggttataggcatctgtcaccacacctgactttccatttggtggggtttttttgtttttgtctctgtattccttttatttaacctgcttgtcagtgactttgagtatttttagtttactattttgttccttttttgtcttttatttttaactctttatgttgctttttttttttttttttttttaagagattgggtcttgttctgttgcttgcgtaggctggaatgcagtggtgcagtcatggctcaccgcagcctcagactcctgagctcaagtgatcctcctgccacactctccaaagtagctgggaccacaggcgtgcaccactatgtctggctaatttttgtattattacactatgtctggctaatttttgtattattattattattcgagacagagtcttgctctatcatccaggctggagtgcagtggagcaatctcagttcactgcaacctctgcctcccaggtttaagcgattctgcagccgcggcctcagcctcccccacagctgggattacaggcacctgccactacgcccggctaatttttgtagttttagtggagatggggtttcaccatgttggccaagctgatctcgaactcctgtcctcgagtgattcacccgcctcagcctcccaaagtgctgagattacaggcctgagccacggtacccggcctaccttgtccactaggttttttttttggttttttttttttacatattcattactggtattttaaagtttttgtctgataaatttatcatcttgtccatgggtctccttgcattaactttctttatggggtaaattttcctgcttctttgcatgtttagtaacttttaaaatgatttaccagaaattacatatcgaacaacagtaatattgaagtgagctggatgtggtggctcacacctgtaatcacagcactttgggaggctgaggtgggaggatcacttgaggccaggagtttgagaccagtctgggcattatagcaagaccctgtctctacaaattttttttttaaaaactagctgggtatggtgatgcgcctctgtgttcccagctactcaggaggctgaggtaagaggattgcttgagcccagggggtcaaggctgcagtgagctgtgattgtgccactgcactccagcctgggcaacagaaaaaggctttatctaaaaaaaaaaaaaaaaaacccaaaaactgaagtgaatgtttcctccctctaaggcagaggtccccaacctttttggcatcagggactggttcatggaaggcaattttttcacagactgaggtgggggatgtggggcatggttttgggatgaaactgttcacctcagatcataaggctttagattctcagaaggagcacacaacctagatcccttgcatgtgcagttcacaataggatttgcgctcctatgagaatctaatgctgctgatacgacgggaggtggagatcaggtggtaatgctcgcttggctgttgctcacctcctgctgcatggccctattcctaataggctaccaaccagtactggtccatggcctgggggtccatggcctgggggttggggacttcttctctaaggcatgccctttcctctgtaaggccagtgatgtggagggctgattccatttaatctgcagtggagctgagtctggactttgttgcagctttacctagattcagttgaacattgactttagtgcctttgagactttgaatcgaacactgacaagatttccagatatcttgctatgctttacagccatggtgctaggtttttgggcctctgggagatttctgcaagaaacaaagaaaggttgcaaagcatggccttagatgctagaatgcgacttgtgtggctctgattcggggttctttgtttccttgtcctaggtattcctggagtggagagccactctttttgacctgccctacatcagaagtcaccgagctcccagcctgcagccagtgtggaggccaaaggatatttgagtttcagcttatgccagcactggtcagcatgctcaagagtgctaatttaggtgagaagccctttattaatttgagtttgtggatttctggcattatttttaaataaatgaaaaaccttttgtttacttataaaatatcataagcaaattacagaaaatttgggaattaaaaaattattttaagaaatttaggccaggtgtggtggctcatgcctgtaatcccagcactttgggaggccaaggcgggtggatcacaaggtcaggagatcgaggccatcctggccaatgtggtgaaaccctgtctctactataatataaaaaattagctgggcgtggtggcacgtgcctgtagtcccagctccttgggaggttgaggcagggaatcgcttgaacccaggaggtagaggttgcagtgagccaagatcgcaccactctactccagcctggcgacagagtgaggagactctgtctcaaaaaaaaaaaaagaaatttataatccagccagtcttttttttttttttttaatatttattgattgatttatttattgagatggagtctctctctgtcgcccaggctggagtgcagtggcacgttcttggctcactgcaacctccagctcccggggtctagcaattcccctccctcagcctccctagtagctgggattacaggtgcccgccaccacgcccggctagtttttgtatttttagtagtgatagggtttcactgtgttggccaggatggaatttttgtattttttgtagagacaaggttgcgtcatgttgcccaggctggtctcgaactcctagactcaagcgatcctcccgccttggcctcccaaagtgattacaagcatgaaccatgcctggccagaaattaaaactattatcaatgttaataaccattattccaacaatcatttttgacataaagacaaatagcaagtcagatgaatgtatggatggctagacgaaaataattttcctaaaataggaaaattcactaatatggtaattaaaagtcttagaacaaatttttgtacaaattaacagaaggaatgttaagtataagtgaagcagttactggatttttttttttttccttcttttttcttgagacggagtcttgctctgtcgcccaggctggagtgcagtggcataatctcagctcactgcaagctccgcctcccgggttcatgccattctcctgcctcagcctcccaaggagctgggactacaggcgcccgcaaccaagcccagctaatttttttttgtatttttagtagagacggggtttcactgtgttagccaggatggtgttgatctcctgaccttgtgatccgcccacctcagcctcccaaagtgctgggattacaggcgtgagctgccacgcctggcctggacttttggtaataggttctttacctaagaggcccaagtttctgaaaggtgcttctgctattaacagaaaataacattctttctgtgtttcagttttagatagtatgcatctggctccttaccatagtagataaggaaatttataccctattcctaccttgaaatatttcagtatcttttttgttttttgagacggagtttcacccaggttggagtgcaatggtgctatctcggctcactgcaacctctgcctcccaggttcaagtgattctcctgcctcagcctcctgagtagctgggattacaggtgcccaccaccacacccagctaattttttatatttttggtagaaacaggtttcactgttgttggccaggctggtctcaaactcctgacctcaagctcccgacctgcctcggcatcccaaagtgcttggattataggcatgagccaccgtgcctggacccagtatctttttttttttttttttttttgagatggagcctcactctgtcgcccagcctggagtacagtggcactatctcggctcattgcaacctctgcctcccaggttcaagcgattctcctgcctcagcctcttgagtagctgggattacaggcgcccaccaccacgccctgctaatgttgtatttttaatagagacggggtttcgccatgttggctggtcttgaactcctgacctcaagtgatccgtccacctcgacctcccaaagtgctgggatttacaggcatgagccaccgcgcctggccagtatcataattatcacagctatttggatagccttagttctatgtgtaaatggattcagtgtttatcaccactcttagagtgagcttttttattcctgttttattttgattctttttgcagtagctggattttctcaagtaatagctttaaggagggctcagaggtatcttgcttcagattgtgcatggtaatgtggcttcatatttgaggggcaacccatgtataaaatttttaaatcccactttctcttttcagaaccttgtatagacccctgtgttgtcttctgacagtgaaagccctgccagccctttgccctggtgcctcctgtcatttcttggtggttcagtctcactgggaaatatatttttctggaagggcttatgggcattctagtctctgagatttttcactcatatagaaatgtcttttgcatggaatgtagctttgtagaggtatgagggtggtctgattttttccccctttgtgactaacatttttgccacaatactgttagcagcggtgaatctgtaggggtctgtagcaacctcagttcttgcctcctccgaagaaagaatttgaccgaggcacataagacagaggagagaccgaagcaaattttagagcaggagtgaaaacttactaaaaagttttagagcaagaacgaaaggaagtaaatatagttggaagagggccaagcaggcaacctgagagattcaagtgtccatttgacctttgacttggggttttatacttcctgggtcttgggttacttctcttgtttcttcccttggggtgggctgtccacatgcatagtggccctccagcacttgggagaggccgcatgcgcagtgtgtttactggagttgtagacttgctcacttgaggcgcttttcccttaccagtcagatgctcctagaggaatgtcatataccagttaaactctgccattttttcatttttttttttttttttgagacagagtctcactctgttgcccaggctggagtgcagtggcacaatctcttctcactgcaacctgtgcctcccaggttcaagcaattctcctgcctcagcctcccaagtagctgggattacaggtgcctaccaccacgcccagctaattttttgtattgttagtagagacggggtttcaccatgttggccaggctggtcttgaactcctgacctcaggtgatccatataccacagcctcccaatgtgctgggattacaagcatgagccaatgtgctgtgcccagccaatgcatacatttttaaacaatgtatttctcctttgctgctgcaaatcattgcctacgtcatcctcttgactcctgcttttctgttctaatatcaggagttcttattgcttatgttttcttggtatctttttttaatggctttattcattgataattttctgtaaactcttagggtttattttatattttttgcctgaatccttatcctttctcggcagtagtgtgtcctatgatatatatttctctcttctttttttttttttttttaagacagggtctcgctctatcacccgggccagagtacggtggtgcaatcatagcttattgcagcctttatctcctgggctcaagtgatccttctgccttagtctcctctgagtagctgggactacaggtgtgcaccgttacacccagtgaatttttttttttttagtaaagtctcactgtgttgcccaggctatatgagatatatatatattttgtttgtttgtttgtttgttttgttttttgtagagacaggtgtctcactatgttgcctaggctgggctcaagctgtccttccccgtcggcctcccaaagtgcagggatcacagttgtgagccaccgcacctagccaaaagctatgtatatcacatgaaccatgtagattaatatagattttcaacatcagatagctagacagttataatgaacacttgctgaaatttttgtttatttttaaagtatattttcctgccactttaaattaattttgcttttttgttatcaatattcacttattataggatagactgtgattctgttatagctgaaagcagtaagcactgtttttgctttacctaattactttttcagcttataaggtaaaatcattccttttagtaacatcagtctcataactctttttgctggaagcctgaatatgtggtatttttcaggtctttctgtggaatttggaacaattctagtttacacatgtgagaagagttgctggcccccaaatcatcagactcccatggaagaattttgtattatacaagaagacccagatgaattattgtttaagtagagcatttccttttattaatataaattaaaacaaatgtttacatccaaatatgtttgtatgtaccttattttaactcacaagttattaacctctgtttttctgagttgcctttttgcctttgggtgctggtgccggggccggggccgggccaggacctcctgactgtgggttggtctgcccttccagggtccagggccagctgtcacagtggcagctaggaaggtagctcctctctagtccagagggctggtgttgtctgcacagccgttctggtgggcattctaggggggaggagagcagcgaaagagccaagagcagtggtcagcctcttgtgtacacctctgacacgtgcactccagtgcttcctatgctgtttctggcacctgatcaagccactgaacctgctctagctgctggaggtttttgctctgtgaccctggctgtttagacctgcccatgttcatcagcccaggtccccgccctcacccactcccatcttctgctcctgcagtatcccaggaaggggtctttactccgttctggagactgtccctttatccagctgccttccagtcttcccctttctttatttttaacatgatcaaccccttcccttcagccccataacagcagtataaaaacactcccagccatgttcagacatgctctgcctacgtagatgaggataatgaggcctaggtgatcatggggtgggcttgtttcttgcatttaacattatatttggagcattttcccattaatatttttcccacaacataatttataattgctctattttttaaatatacatcaaaagctttatacaatttttagccacttgtattttccaatttttattcccatgatggccatccctgtaactaaatttatatatattttaaatcaatgataactgctacaggacagtttcctagaattggaatgaatgagtcaaaagttgtgcacaattttagggtttttttttcttttttttcgagacagggtcttgctctgtctctcaggctggagtgcagtggtaagggcatagctcactgcagcctcgacctctcaggcttaagtgatcctcctgcctcagcctcctgagtagctgggactacaggtgcaagccaccacgccctctagagaagctttgctttggaatctttacctggagtgtgttggagtgcttgtttcccaatcccttgataagtgttacttattttttctttctaccagtttagtaggtgaaaaacttttttttttttttgagacagagtctcgctgtattgctcaggctggagtgcagtggtgcaacctccgcctcctgggttcaagcaattctcctgcctcagcctcctgagtagctggggctacaggcttgtgccaccacccccagctgtttcggtgtttttttttgtttgtttgtttgtttgtttttttgagacggagtctgttgcccaggctggagtgcagtggcgcgatctcggctcactgcaacctctgcctcctgggttcaaacgattctcctgcctcagcctcccgagtagctgggattacaggcgcacgccaccacgcccggctaatttttgtatttttagtagagatgggggtttcaccatgttagtcaggctggtttcagaactcctgacctcgtgatccacccgcctcggcctcccaaagtgctgggattacaggcgtaagccaccgcgcccggcaggtgaaaatcttaccattttgcatggtttacatttttttcttttttgagacggagtcttgctctgttacccagcctggagtgaagtggtgcgatcttggttcactgcaacctccacctccagggttcaagcgattcttttatggtttacattttaatacgcttattgatcatattgtccaattttttgtgagtttcctgttcacatcctttgcctatatttttttgggggtgacacttgttaatttgtaagagctctttacgtatagggacatcagttttctaacctgtaaggaagtcttggctgggagttgaaaccccaggctagaaggcgacccttagactttttaggtctgatggcgggcctatgctggtgtgggaataacaccgccggtctcagctggaggtcgccagccctttgcaagagcctgccggtccccgcgggctgcagcacaccccggcgcgatgtgccctgcctgtgtctgccggaggctgtagtgcgcaggagcggaaaccaggccgcccttcccccacccgcttccggccgcggctcggttctcccgcctccgcctccgccgcggctcgtggttgtcccgccatggcactgtcgcgggggctgccccgggagctggctgaggcggtggccgggggccgggtgctggtggtgggggcgggcggcatcggctgcgagctcctcaagaatctcgtgctcaccggtttctcccacatcgacctggtgagggccgggcgcgcgcgcgtgaatggcgggctgtggtgcgggggctgggattcgggggttccggggctccaggggctctgaggctcagggcccggagcccgggaccggagttgcggagcgggggcaggctgagaggctcgggttgtgccccccccgcgggaggagactgttctttgggcacggggcgggcctccgctcgctgggccggctccggacgccgaggaggccgcgggcccccgcctccccggcagcgccaatgtgtggcgcttcgtgggcgtgaagccgcctcttatcctcccttcaaaacaaattcccggctgttaggagatgcgggagaggattgagtccctcgcggatgttgtgactttaattttgaggtccctgtcgtaactccgaagtaacgacgcggggcggaggatggcaatgatagcgaccaacgcgtcccgagcgctggtcacgagcgggtttacacacggaacgcgcaccatcttcataccacccgaggagtgcaaacgctatttccaccctgctttatttttaacagatgaggaaagggagacgcaatggggttgagtaacttaccctgggtcacggagcgagtggcagggctcccgcaggctgcgtgactgtcattgctctcacagtagacggtacactcgcttgtttcattaaagacgttaggactgtgccttttgcattggtgtacgttgacaagccagtgctattttgaatcgttatttctactaatgcaaactttttagagattggagatgttactggcccttcggtgtgagtttaaagtgtcttaagggctagtggaaacatggaatgaacaaaaaagtacgggtggccgactgagtcattgtttctttcctttatgtattatatatttaagcaaaaattagataaaacttaaaacatgatacttttttaaccatgtgtaaaagtttcctttcacagttctcaggttaatagtaaatgaaattgtgtatggatgaaggcttgaattaagggaggcagcaaaaattcaataaacgtttgccatgtatcatttaagaaaaagaacagaacctgggcaacatagagaaaccccgtctctacaaaaaaagaaaattagcggggcgtggtggtgtgcgcctgtggtcccagctacccgggaggctgtgtcaggaggatcgcttgagcctgggaggtcgaggctgcagtgagctgtgtttgcaccactgcactccagcctgggcaacagagggagaccctgtctcaaaaaacaaagaaaaagaacagggcatagttaaatttaatattttgtacttgaaagagtaattcgattgaaagagaaatactttagtattttttgagacagggtctggccctgtcaccctggctagagtgcagtggcccgatctcggctcactgcaacctccgcctcccaggctccagtgatcctccacctcagcctcccgagtagctgtgactacaggcatgtgccacctaattttattttttctatttcttgtagccaccagggtctcactattttgcttaggctggtcttgaaggtctgggctcaagcgattctctcactttgtcctcccaaagtgttgggattacaggtatgagccaccactcccggtgtagagaaatatgttaatatattttcagttagtgtttacctcgacagcacatatagttttaatgaattcacatatttttatggcatccagggagtttcctgaaatattttccaggatgattaaacaaacaaaatataccattctttcaaagtatttttgagaagtttatctctgacattaaatctagattcttacatgcattaaattattctttatcagtttaacaattttggtatggcgattcgaaaaacgctttctccactaatgtagcagatatcaaaagttctggattacaggtgctgagagtagtgatacagctcaaacatacgtaaacgtttgtcatttatctggggtttatgcatttgtagattgatctggatactattgatgtaagcaacctcaacagacagtttttgtttcaaaagaaacatgttggaagatcaaaggcacaggtaactatatttctcataccatttctataacttgatggagcttctatttgtgataccagattaatcctgcctgtcatataggagggaaaaaatgggtgaagctctcatttcagctgagagattgtgaaggataaagatatatcaagtaaaggactaaagattaagccctccttttttgttctaaaaaggaaataatcccgtgatggtgtaactttcatggcctctttatatttaagtttctgatgctttgcttaggatgcaccttgtgttcctacaccccctagaggttgactactgctatgtttgggggctagaggagcgttatgctgctgtcctagttgaaacaagacagttcccccgatctttgtttagtttttttagtgttccttggtgattcagagtcttaaaacatcttttccctttgcctgtctcccaacctgtttggcaaacccccacttgtttctctttttctttcatattttggcttcctcctccaggagtactttcctaaaccttttagactaagtcaggttggtttttctctcataacaacctttactttacttttcctatcattttcttttcttttttttttttttttttttttttagagatagggtctcactctgtcgccccaggctggagtggagtgatgcggtcatggcttactgcagcctagaactcctggcctcaagggatcctcctacactggcctcccaagtgctgggattacaggcatgagccaccatgcctggccttttcctgtcattctcatggcatttatcagagtctgtagttgaacttaatctggattgttatttgattaatgtctctcttgcttgacatgtacgttgtatagttcctggtacatgcaagatgctcagtaaatacttgttaagtgaatgaatgaatgacacttggttacttcatgttgtatttttgctgaagcttgccattcatgtagaagtgtgtttggtggtacgtgggtcagggggggctctccggttattttataagtataaaagtataattttataagtgtagcttaaccctaatgcaattttctcacatttttggacttctttggtgtttaatataaataaggtactatgtaagtagataacagcattgtggcttccagaagcagatttcagataggaacagaaatattgtagtaattcagtgttgtttatttttccaggttgccaaggaaagtgtactgcagttttacccgaaagctaatatcgttgcctaccatgacagcatcatgaagtatgctatagtgattacattgcaaagttgtataagggttttgtaagccaaatatataagctcaaagtcattcagcttttttaaaaaaaatgatttttctagaattattaaacagtggtggtttctgcttacagagtggcattctttttaccagttcataaatacatggtttgaatgatttagaatggtgagatagtttaatacttttaataaataagttacttggaaatttataaagaccttatatgcttgccttaagtaagaagatattttaaactatgaaatatccttatttatgatgattcagacttttctaaagtgtttgcctttttttgtttaaaagtttccctcccaaaataatctgtagtatgactctgacttctgtaatataacacttggaattgtggtagggcagtagtattgacagtacataaatatatttatctcagtaaagatagagtaaatatataattttggaggagttggagcaaaggaactgtgggccgaaattgtcctttatctatggtggtttagcttgcaagtaaatagtgttaaaaatagtccttgtttgaggtactggaattgaggtacttaacactttctcagggcatttgtatctccggattgtgttttttttgtgtgtgagatagggttttgcgcttattgcccaggctggagtacagtggcatgatcttggctcactgcaacctccgcctcctgggttcaagcgattctcctgtctcagcctcctgagtagttgggattacaggcgcacgccaccacactcagctaatttttgtattttagtaggcggggtttcatcatgttggccaggctggtctcaaactcccgacctcaggtgatccacccgccttggcctcccaaagtgcagggattacaggcgtgagccactgcacccggcctgtatctccggcttgttttttagttttttactctgtgaacctgcctgtagccctataacctccttaccctgtgttgctttcccagtgctgctaaaaacagagaccctaggggcctgaaccctgcctgatcctgatcatgtgaggtgaagtcagaggccaggcagatcctgggaatgtgttctttatgcgttcccaggcacttgctgcccaaagaaggcctagtgggactagtgaagtcatgccatctttctgccagtttgagatctttctcttgtgccctagctggccaaaaaggataggaatttgaaggaaataatttctttaaaatctgcttatgtttggaaagagtcaaaccttactatctatatgacatataatcctgatatcagttttgtttacagttactatgtttttttcagaactgtttattatactgcaaagatcatgtggaaggctagttattttggtgacctttttttattttgttttgtagccctgactataatgtggaatttttccgacagtttatactggttatgaatgctttagataacagaggtgaggttattttaatacttttaatttctcagtatttcctctctcccatatcaaatttgtttacaaatttaatatttattagactattgtgatttagaacttaaaagacttaagagaaatgatcgagtttaaagcatgcccattgattgcagttttatatagaaatgacttattccaggcgggaatttagctatcatattctctgcatttctaccaaaaggtataaatagaagtgaagtgaaaagctctcaaaaagtgtgactgtggctcagcacagtggctcacgcctgtaatcccagcactttgagagaccaaggcaggaggatcacttgaggtcaggagttcgagaccaacctagtcaacatggtgaaaccgtctctaccaaaaaacacaaaaattagccggtgtggtggcatgtgcctgtagtcccagcttctccggaggctgaggtgggagaatcgcttgaagccaggaggcagaggttgcagtgagcctagatcacaccactacactccagccttggtgacagagtgcgaccctgtctcaaaaaaagaaaaagtgtgactggagggtggggtgggggatgcttgagtgatattctttgtctgtaattacttccacatgtaaaagtatatctactaagtgagtttacaacaagttgggccagaaatatctaaataaaaaacacaaggaaaagtcaaaattacgtttattttttaaggcttggggggtctcactgttgcccagactagagtgcactggtgtgatcataactcactgaagccttcaaatgggctcaggtgatactcttacctcaacctctgcagtagctactctgcagacaggtaccaccatacccggctaatttttttatgtttatttttgtagggatgaagtcttgctttgttgcccaggctggcctcgaactcctggcttcaagcagtcctcccacctcagcctcccagaatgctgagattatgggcatgagccagtgctcctggcgtgaaattactctcttaacctgactcatcttttttccctagccttaaactactttaatagttccaagttgatattccacattctgccttcatttctatcatgtattatctgctagttatattagaatagtggtgagtttaggaacaccttgaaacagtgttttgtgtaaggtacagcaatagaagagaaatatggcacgttggatttttaagattatgtgtttctgtgggtacttctcctggagtaaatttgtgatataaattctatttgatattttgctaagtgaatgtctcttaaatgtctgtaattaacagttgtattattctggccatagctataagaaaattgtacaaaaaatgaagccagtaagatagttttgagtctgtgtcatcctaattaaagataactaattttttttttcccaaaaactcatactgtttgttttacttccagctgcccgaaaccatgttaatagaatgtgcctggcagctgatgttcctcttattgaaagtggaacagctgggtatcttggacaagtaactactatcaaaaaggtaaagaaaagttttatttttttaacttcccaaatatttatttgagaccttggagcaggaggaaataaactttgtatttatataaaatgaacaggtgaacatccaaaatgtaaggacttttatgcttatataaaacttaaaatgcggggccaggtgcagtggctcatacctgtaatcccagcacttcgggaggccgaggtgggcggatcacctgaggtcaggagtttgagaccagcctggcaagcatggtgaaaccccatctctactaaaaatacaaaaattagctggacatggtggccggcgcctgtaatcccagctacttgggaggctgagccaggcgaatcacttgaacctgagaggcagaggttgcagtaagctgagattgcaccactgccctccagcctgggctacagatcaagcctctgtctcaaaaaacaaacttaaaatgctataaacgtgctcaaaagactatgggcaaggaaatctttcagctctgccattttgtttcatttgacttttgtattaaaatccttagagtggtaagcatgatataccaggcatcaaaaatttctttgtgtcggctgcgtgcagtggctcatgcctgtaatcccagcactttgggaggctgaggtaggcagatgacttgaggtcaggagttcgagaccagcctctccaatgtagtgaaaccacgtctctacaaaaaatacaaaaattagctgggtgtggaggcgtgtacctgtaatcccagctagttgggagactgaagcatgagaattgcttgaacctcggaggtggaggttacagtgagccaagatggcaccacactccagcctgggcaacagagtgagactccatctcaaaaaaaaaaagccaggcgtgatggctcatgcctgtaatcccagcactttttgggaacccgaagcgagcggatcacctgaggtcaggattttgagaccagcctgtccaacatggtgaaaccctgtctctactaaaaatacaaaaatcagcgggcgtggtggtgtgcacctgtaatcccagctacttgggaggctgaggcaggagaatcccttgaaccggggaagcggaggttgcggtgagctgagatcacgccattgcactccagcctgggcaacgagcgaaactctgtctcaaaaaaaaaaaaaccaaaaaattctgttgtctaagagtctgggcttataatgtggaagggaactttgaaaactttttaggggtgtatttgtgaagtacttcaaacatttaaatacaactagagaataatagaacaaaatacctgtgtgctcatacctcagttttgttttggtttatttatttatttgtttatttttttgagacagaatttcgctcttgttgcccaggctgcagtgcagtggcgcgatctcagctcgccgcaacctccgtctccctggttcaagcgattctcctgcctcagtctcccgagtagctgggattacaggcgtgcgccaccacgcctggctaattttgtatttttagtagagacggggtttctctatgttggtcaggctggtcttcaactcctgacctcaggtgatccacctgcctcggcctcccaaagtgctgggattataggtgtgagccgccatgcctggcacatatctcagtttttaaaacctcaacacggcttcatttgctattcagatattttttctttcagttcttttaagaagttaaatattgtagttacatttgaagagtcgttttccatgttttgaaactatagaaagagaattataatgtacttaacatttgctggttgcgtctaattttttttggcagcttattcatgttagaaattgtgtctttgtttcttttaactgttaaatgttattcttggaaccttattgaataccattctacaaaagactgttgtgtatgtcagtgcgtattaagttgttgaataagtggaggccttcagtatctgttgacagatcaagacggaagttctctgtctgcattgcagtatgagtctcatgactgcttgccatgtggctaccctcaagaaagcatattggaaggctgagggcatcagaaatggtgtttcagagaaaactctaaatctgctgcaatttatattaaaacagtatttgagagttttgattcttgaacaattagcctggctaatttttgcatttttggtagagatgaggttttgccatgttagccaggctggtctcaaactcctgacctcaggtgatccgcctgccttggcctcccaaagtgctgggattacaggtatgagccaccacgcccggccagacattgctttttatatccttgttactgtgattctgacacaccactgtgtattaagactgaaggtggctgggcatggtggcttacgcctgtaatcccagcactttgggaggccaaggcgggcggatcacctgaggtaaggagttcgagaccagcctggccaacatggtgaaaccccatctctactaaaaatacaaaatttagctgggtgtggtggcacgcacctgtaatcccagctacttgggaggctgaggcaaaagaatcacttgaacccgggaggcagaggttgtggtgagcctagatcacgccattgcactccaacctgggcaacgagcgaaattccgtctcagacaaaaagaaaaaaagaagagactgaggttaggaatatctgagataatgaaagatgattcatttgatagttttgaaaagttgtctcaggtgtcatgtacttcttccaaggcataaattccttaaattgtaattttaaacttgaatgtgtatcaataaaatgggctgggcgcagtggctcacgcctgtaatcccagcacttttgggaagccaaggcgggcgaatcacatgaagtcaggagttcaagaccaagctggccaacatggaaaaaccccgtctctactaaaaatatgaaaattagctgggagtggtgggagatgcctgtaatcccagctctttgggagcctgaggcaggagaattgcttgaacctgggaggcggagattgcagccaagattatgccactgtactccagccagggtgacagagcaagactccgtctccccaccgccaaaaagaaacgtatatcaataaaatgaagagtatttggtttagtaacacctaagatttttctgtgtagggagatatatcttgaaattaatcttgtagtttacttaatttcaggagattataaggatatggctgtattccccagacccacttagttttgctcaaaaaaaaaaaaaaaacacatataagaaaatggctgcgaataatatttagataacatttacaactttgagaaataatttcttggaaagctgctgtttgtctttccagtagtttttctgtttagtgtgatcaaggtaaactcatatttgacactcaggtgtagtaatttttatttgggcttgtaagtcatgttcactgaaccaggagtcggcgtcctggcacagccttagctatgactggtagattcagttagcttttgtgttagtttatcataaagtaagcattttggagtcactaatattttaaaatttccttgacaacgtaaaacgtagttggaatatagatgaatgaagtgtttatattaccttataatgttgagaaactgccatcatggagtaaatttttctcatatcctgacttcatagggtgtgaccgagtgttatgagtgtcatcctaagccgacccagagaacctttcctggctgtacaattcgtaacacaccttcagaacctatacattgcatcgtttgggcaaagtacttgttcaagtaagagtgtatatttcttggcatgcttttcggtactgatgatggaaaatggagtcatttttatttaattaccttgaagagattgaactcaggatgtttaaatatggtgaagggatgctttagtagctttcttgcagtatttcttaggttaaatgtagctggccgggtgcggtggctcacacctgtaatcccggcactttgggaaactgaggtggtcggatcacctgagcgcaggagtttgagaccagcgtggccagcatggtgaaacacatctctactaaaaatacaaaaattagttggccgtgatggcgagtgcctgtaatcccagctactcgggaggctgaggcaagagaattgcttgaacccaggaggtggaggttggagtgagccgagatcgcgccactgcactccagcttggcaacagagtgagaatttgtctcaaaaaaaaaaaaaaaaaatgtggccatgactgttcaggaaacttagtcttatattggagacagccatgtaactaagcgataaaaatctttatatttggaaatgtgaacatttacttacaaataacccattggttataaaagaaatcacaatggaagttaaaaatactctgtactgataatgatgaaaatgctataccagaatgtattgaatgtggtggttggcaaaaagttacagatttacatacatgaagaaaggctgaacattaattactaaatctttactaagaatccaatttaagttagaaaatgaaccacagaatacactttaagaaatgagaatggtgtgggcatggtggctcatgcctctaatcccagcactgtgggagggtgagatgggaggatcccttgagcccaggagtttgagaccagcctgggaaacatggcaaaaccgtgtctctacaaaaaatagaaaaatgagccaggtgtacctgtactcccagctacttgggaggccgaggtaggaggatcagttgagcctgggaggttgaggctgcagtgaaccgagatagtgccactgcactccagcctgggtgatagtgagatcctgtcttaaaatgaagaaagaaagaaaaaaagaatgagaaggaaggatattaattgaagtaagagcacatttgattacaaaatagaagaggagtaagtgagaactaaacggggaatacagatagcagagattaaataggctataagaaaaaaaagggatgataataagaccatggtagtacataaaaaatttaaatgatctgggtaaatacatttttaaaaacttactaagtgcccagtgcggtggctcaggcctgcaatcccagcactttgggaggctgaggtgggtgggtcacttgaggccaggagtttgagaacagcctggccaacatggcgaaaccccgtctctactataaatacaaaaattaaccaggcgtggtggtgggcatctgtagtcccagctacttgggagactgagccatgagaatcacttgaacccagtgggtggagattgggccactgcactccagcctgggggacagcatgagatgatgtttcaaaaaaaaaaaaaaaatgaaaggaaaatagaatgcctgaatttagcagtataccttagagcaatgtaagtagtttaaattattctaaataatgcaccgaacctatgttatttttacagattcatttcacaaaacttgcaaggagtatattgtaatattagctaaactctccctgagaaatttttaaaagggaatactacttagcttgtgttattaggctagcaatgtctttgatagcaaaacctgtcaaggccattatggcataagaaacaattgctagtcagtctcacacctaaataatagatgcaaaaatcctatgtaaaatattagcatatcctgggaatgggcgcagtgtatcatgcctgtaatctcagcacttggaagctgaagcgggtggatcacctgaggtcaggagttcaagaccaacttggccaatatggcgaaatcctgtctctattaaaaatacaaaattagccggacatggtggtgggcgcctataatcccagctacttgggaggctgaggcaggagaattgcttgaacccgggaggtggaggctgcagtgagccgagatcgctctgctgcgctccagcctgggcaacagagcaagactccatctcaaaaaaaaaaaaaaaaaaattaccatatggatctagaatcatataaaataaaaagtgtgtcttgaccacgtgtctattcaggaatacaagcatggtttaaactagaaaatctgtaaatgtcattcactcattaggaaattaaagataaactatatagttttcatagatacagagaaagcatttggtaaaatttagcaaatggcctttcatgatgaaagtttctactaaaacagaataaaaacttactaggccgggcgaggtggctcacgcctgtaatcccagcactttgggaggctgaggcgagcggatcacgaggtcaggagatcgagaccatcctggctaacacggtgaaaccccatctctactacaaataaaaaaaattagccggatgtggtggtgggtgcctgtagtcccagctgctcaggaggctgaggcaggagaatggcgtgaacccgggaggcggaggttgcagtgagctgagattgcaccactgcactccagcctgggcgacagagcgatactccgtctcaaaaaaataaaaaataaataaatagataaaattaaaaataaaaaaacttcttactaaaatgagaatgttctcaacccgataaagggtattttgtagaaaccttcagcaaacattgtctttaatttttgcactcagaaaagtatacataacagtgtcaacttgataaatgttcacaaaaactacacttggaagctttatttatttggcaaacattttttttctttgggaggctgaggtgggtgaatcacttgaggccaggagtttgagaactgcctgggcaacatggcgaaaccctgtctctactaaaaatacaaaaattagtggggtgtggtggcacacgcctgtagtcccacctactcgggaggctgagccatgagagccgcttgaacctgggaggcggaggttgaagtgaatggagatcatgctactgcactccaacctgggggacagagcgagactgtgtctcagaaaaagacaaaaaaaaaaaaaagataatgtggccaggtgcagtgacacacacctgtaatcccggctctttaggaggccaaggcaggaggattgcttgagcccagcagtttgagagcagtgtgggcaacatagtgaaaccccatcactacaaaaaatttaaaaattagcaaggcatggtggcacatgcctgtggtcccagctacttgggaggctgaggtgagaggatcacttgagcctaggaggtcgaggctgcagtgagctgtgatcacaccactgcacactagccttggggacagtaagaccctgtcacacacacaaaaaagataatctggcaaaattaatatgagcagcatttttcactcgaagggaaacctaaataagcaataagcaagttatgttttaatcataagacttacttggaaaattaagtataagaccatagtaagctacagatgcttctcagatacttcccgataaactcatcataaataaaaaataccattaagtaaaaaatgatgctttttttgttgttgtttttttgagatggagtttcgctcttgttgcccaggctggagtgcagtgcaactgcaatctctgcctcctgggttcaagcgattctcctgctcagcctctcgagtggctgggattacaggcgtctgccaccacgcccagctaatatttgtattttagtagatacagggtttcaccttgttggccaggctggtctcaaactcctgacttcggttgatccacccgcctcggcctcccaaagtgttgggattacacatgtgagccaccacgcccagccaaaaatgcattttaatataacctcaataaacctgttgtaaaggtgaaaaatcattggtggaccattttaaattagcggctgtctactattttgcactcactagttggcaaagcgttaattttaggaagtgttaacatgccattgttgggagtgactatcagagctttgaaattatagttgggtggggggttgtacaaaggatttctgtaagataactttcattaatcatatacttgaggaaatactggaaacttttatatccatgagttattaaacagtttttaggataactttattaataaaagagaatctcagcttaatactttcaaattgtttgttaacactctgttcagcagtaaagagccattctaccatgaaaaaaagttaatcttgttcattgctgaatttctatcccctagatggggactctgcacctgaggtatataataatgtttgttgaacaggtagctgcaggtgtaaacacaaacattattctggtgttagaatgttatccaggttgtaagtgaaaaccactcacctgtttcttgagcagaggttttaacattgaaatgtgcagagcctcgctgataggaatggatgtaggtctgctaaaatttaaccttgcttacattgctgttgaaattgggatgcaagctgtccaagcacattgtgttaaacttttaagtttatagtcatttatccgttattcacttttttttttttttttttgagacggagtcttgctctgttgcccaggccggagtgcagttgtgcagtctcggctcactgcaacctccatctcctgggttcaagcgattctcctgcctcagcttcccgagtagctgggattacaggcgtgcgctaccacgcctggctaatttttatatttttggtagagacgaggtttcaccatgttggtcaggctggtctcgaactcctgactttgtgatctgcctgcctcagcctcccaaaatgttgggattaaaggtgtgagccactgcgcccagccagttgttcagtctttatctctgctaaatatttggaatattctaaattacatgtttgtttagaatgctttgttatacagaagtatttactattcttaaattatagccagttgtttggggaagaagatgctgatcaagaagtatctcctgacagagctgaccctgaagctgcctgtgagtaaattatttggcatatgttttatcagatactattatctttattttgttgatttaattttggtagcttaagggaaaaaaattgctatatgtgctaggtaatgtgtgtttaacatgtgttttttttttgttttttttttttttttttttttttgtctcagaggtggagtttctctcttattgcccaggctggagtacaatggtataatctcggctcactgcaacctccgccttctgggttcaaatgattctcctgcctcaggctcctgagtagctgggattacaggcacctgccaccgcgcccagctaatttttgtatatttagtagagacagggtttcaccatgttagccaggctggtctcgaactcttgacctgaggtgatccacccgccttggcctcccaaagtgctgggacaggcgtaagcaaccgtgcctatccaaaacaatgttttacaaaaaaaatatgattccgttttactgatgaggaaatcaaggttaagagaaatttcacaagtctagtaaatagagctgcgagttgttcctagatctcatgactggtctgtgctttgaactgttatatgtgtagctttcagaaactaagttacaacaggccaggcaaggtggctcacgcccgtagtcccagcattttgggaggctgaagcagctggattgcatgaggtcaggagtttgagaccagcctggccaacatggcaaaaccctgtctctacaaaaaatataaaaattagccaggcatggtggtgcatacctgtagtcccaactacttgtgaggttgagacgggaagatggcttgagcccaagaggtagaagctacagtgagccgagatcttaacactgcactccagcctgggcaacagagtgagactttgtctccaaaaacaagaaagaaagaaactgggatacaaaaagatgctgatgaatgtgttattttcttattccttgaactcagaatgtgttgcatttggggatttccatgagtgactttctttttattcccaaaggtgagtgaaaagagttcagttctacatttattacggttgaaaataaaataatgatcgttttataggggaaccaacggaagccgaagccagagctagagcatctaatgaagatggtgacattaaacgtatttctactaaggaatgggctaaatcaactggatatgatccagttaaactttttaccaaggttagatttactttttttataatcatggatagatgtattgttgtgcatagatgtattgttctagttctgcttgttttaaaatagtccataaaattgaattaagcttctatgtatatgccttgtgatgtcctaataaaatgattgatgcagtcaggatatgcaagttttaaaatgttaccatctacactaaatctatcagtataacatctaaataggaggtaaaatgagaggtggcttgtataccttcttggttgtctttccttctctcactttttacagaacttcttcgttttcctgctgcttctcatcttcactttttttttttttttttttttgagatggagtctcactcttgtcgcccaggctggagtgcagtggcacgatctcggctcactgcagccccgcctcctgggttcaagtgattctcctgcctcagccttccgagtagctgggattacaggtgtgtaccatcaggcctggctaattttgtatttttagtagaagcggggtctcaccatgttggccaggtaggtcatgaactcctgactgcaagtgatctgcccaccttggcttcccaaagtgatgggattataggcgtgagccactgctcctggcttcatgttcacttttatttcttgctcatatctgctattagcagtttgactgacatgtgtcctaaattgcccttgaaccccataagcccctttttcttggtgaaatccctcttcatcagtagtatatactatttgcctgttaaatatttctagagaaatctgtgaaattgtttttattgggtctacctaattattgttcatctagacccgtaggtccgtgttttaaaagtttttttgttctgtcttgactccctagcaagttgtacgtgtgtggggtttttttgactctttttttcctttttgtggagaatggggtctcaccatgttgcccaggcagatctcaaactcctggtttcaagtctcaaactcctgggttcaagcgatcctccagcctctgcctccctaagtgctgggattacaggcatgaaccactgagcctagcccctagcaagtttatcacagagcttaaaactttctcagctcttatcaaactgcctcagtattcttgcaactctcactaagcagatgaccttaaggatataataacaggtttgaaaccattggacataatttacctgttgagagactgttccacataaccgaaaactctttttctttctgctggagagaatccactttcggtaaaggctaacttttgcatgtggtgttttgctttccttttgtaccattcttcagacaggattttcgtctctgtcctgtgtctcggatcttttttttcttggtttcttttgtctgctttccaacacgcacaggttctgctgtcttaatcaaatgacatactgctctccccagcttgtatttcgtcttatttcctcagtggtaacagatgtcacatgttgacttttttttttctttctttttttttttttttgagagagaatcctgctctgtcgcccaggctagagtgcagtggcatgatctcagcttgctgcaacctctgcctcctggttcaggctattctcctgcctcagcctcctgagtagctgggattacaggtccgccactatgcctggctaatttttgtatttttagtagatagggggtttcaccatattggccaggctggtctcgaactcctacctcaggtgatctgcctgcctcggcctcccaaagtgctgggattacaggcatgagccgtcgtgcccagcccacaggttgactttcttatccctattgcatttatttcctcactacagcccttttctaaaacatggttgtattagggttctctagagggacagagctaataggatagatatatacaaaggggagttgatagagtattaattcacacgatcacaaggcccaacaataggcccatctgcaagctgaggagcaaggagagccagtctgagtctcaaaactggagaatttggagtctgatgtttgagggcaggaagcatccaacatgggagaaagatgtaggctgggaggctaggccagtctagtcttttcatgtttttctggctgctgtatattctggcctcaatggcagctgattagatggtgcccacccagattaagagagggtttgcttttcccagtccactgactcaaatattaatgtcttttggcaacaccctcacacacacacccaagaccagtactttgcatctttcaatccaatcaagttgacactcagtattaagcatcataatggtttttattttgattatacttaagatgccgtaaacttcgatatggtcaacagcagtatcttccaaaccagtatccttatttccattccaatctgagcaagacttgaaagccagaaaaatctgaagtgcatctccaatctgttatttagcagataattttaaacatctgctgtgtgccagacacctctttaagtacaggggatttagttgtgaacaagacagaagacagagtccttgctctttagagggagttcacagtctagatgagaagtcaaactttgaacaataaatttcagcttcagagtcttaatgacattaagttcagatgctttgcagcccttgaataataagtttcatctaaaggactcatctcctggcctgcatacccatttcagatgttgttagggagaggcttcagaagaggctttctagagcaggtgacatttaagcccaaggcttgaaagaataagagtcagaatagggtacagtatgtacaaggaaactctgaatagggtacagtatgtacaaggaaactctcagttggaaaactgacataaatcccattaagggggagagtggaaaaagatgactggagagagaagttgaggtcagatcaggcagactttctaggccttcttaaggatgttatagcaagacagtgggaatccattgaaaggtggtcttacaggatcactataaggggatagaggggatgcacatactaccctaggatctgatattcatattataaccaatctgggacagtgcccctggagttgtgcagtgccagaataatctggagtacagccatctgtactcccactggaacatggaggagtagactaaacaggactttgcatgtatatggtgaagatcagtggaataaaaaatggtacctggctgggcactgtggcttacacttgtaatcctagcactttggaaggctgaggcgggaggatcacttgaggccaggagcacaagaccagcctgggcaatatagcaagaccccatctctaaaaacgaaaaaaaaatagccagccatggtggcctgagcctgcggtccccagctactcaggaggctgggacaggaatatcacttgagcccaagaggttgagacttcagtgagctatggtcacaccactgcacttcagcctgggcaggtcaaagaacagaggtgctgttctccgatataagtgagctgggaggcagatgtgtgtagaggggttgggggagggtaggagaaggtgataataatcaattttgaactcatttgagattcttttggaacattagagaagtggttttgtagataagtagagaggtttcaactagggatatggttgggattcctaggtttatagatgtggttaactactggaaatggacatgatacaccacagaggacagaatgaaaagatggttcagtacagaaatctgaggggctcctgatatttagtaatagttgaatagaagagatggagcttaggcttagaaaactgttggttcaagccttcaagatcctctacaaaatgtttccagccacatttgttacccaagtcatagtggattcatctccttgcctttgtacccatttcacatgttgctgtcataaggagactctttccttatttcttagataaaatataaatctttttttttttttttttttttttgagactgagtctcactctgttgccaggctggagtgcagtggtgcgatctcagctgactgcactctccgcctcccaggttcaagcgattctcctgcctcagcctcccgagtagctgggattacaggcacgcgccacgacgcccagctgatttttgtatttttagtagagatggggtttcaccatgttggccaggatggtctcgatctcttgacttcgtgatccacctaccttggtctcccaaagtgctggattacaggtgtgagccaccacgcctggccagaaatccttactcaaggctttgtgatattcacactaaattgtattctgattatttgtatgtttggcttattctctataaagattaaggatgctcagttagtattgatggattaagtatattttgatagaaatggctgtgatttttaaatatagccaaatttctgttcttacctggtaccagcaataaatgtgttgaataaattaatcaacaatagaaaatgcagataaggaaaaagaaaaaaatattaaaatcacttgaagttctaacacatcttttcatatgatagtttctcaatctacttgtaatgtttttgtttttgtaataattgtgtgggggtttttacattttatttttgttcatgtttctgtgggttatttttggaggggagggcacattttaaagatatcgcagttcagaagttctgttgtgaagcactttagtttaaaaatctgtatactttgtgtgcatgtccccatgagcttggaggcattgctgactggcatccctaggctcagtgattgtctgtagttgtacatttatttacaactacataatgtacatttatttgtatgattgtgcttcagactgatctttggagctaaatttagggaagcttttggagaggtgacttaggaaggcaggggcagtcggcagttcagggctcctttactctgcattcctcagagcacttctgcatttcgctgttttcaatgtagagattctgttagaacttccttttacaaatgtttttccttttgaaaattgttatgctgctggtatatgacatgtatctttaaatcagatttcatagtgtaatatagatcagcaatgacgttttcttgtatcttatcaattagggattatggggttcatgggatctgtctttcttttgtaagctttttaaagatgacatcaggtatctgttgacaatggacaaactatggcggaaaaggaaacctccagttccgttggactgggctgaagtacaaagtcaaggtaaagaatacattttagtcttggaacacctaagctggaaatatcctcgcgtaaagtctttgtatagccctgttgttgcttgaaaatgatatgtcttcatatattcaaacagtgcaaaaaaatatgaagaacaaaagtcactgaagtcccacacttcagaaatagccactaataacattttcaggagtgttctggtggtccgccctatgtacacagatgcaggcattcgttatacactgcgtaaatggaatcatactattgataaactctcacttgcttttgtcagtcagtatagttaactagtctcttattaacatgtagtgtttttgtattttccctgaaataaagttttgaaattgctatatatttatgtatatcttttttttttttttttttttttttgagaccgtgtctcgctctgttgccaaggctggagcgcagtggcacgatctcagctcaccgcaacctgggttcaagcgattctcccgcctcagcctcccgagtagctgggataacaggtgtgagccactgcgcctagcctatttatgtacacctttgtacccttgtgattatctctttaagatttaatctagaaacacatttttaatgtaaaatttttttaatgtttagaaatgaaaagttttttgaggcatagtcttgctatgttgcccagattagagtgcagtggctgttcacaggctgtcatagcacaaggcatccctggactcctgggctcaagccatcctcctccctcagtctcctgagtagctgggactgtatgcaactgtgcccagcatattttaaaattttaaatgtaggaaaactattgtagtggctgctttctcatcccactcccctttaacactccttgtctctcctttatctgaactgtattaggattaatttatgcacagcagtatagcacccattgaaacttaaaagatcccgggagacttgggatatcattttggagcagttctcaacaatcagggatagttatcaaacagatttaattatgactctagtagtgtccgcttactgagttctcattctcactaggtgctgggcctaatgcttatttatcatcttatctacattatatcttcaaatctcccagtaatcctatgaggtactgaggtggtcttgtacctttcctatctcaggtttaacagtttttttttttttttttttttttttttttgagacagagtcttgctctgtcgcccaggctggagtgcagtggcgcgatcttggctcactgcaagctccgcctcccgggttcgcgccattctcctgcctcagcctcctgagtagctgggactacaggcgcccgccaccatgcctgcatattttttgtatttttagtagagacggggtttcaccatgttagccaggatggtctcgatctcctgacctcatgatccgtctgcctcggcctcccaaagtgctgggattacaggcgtgagccaccgtgcctggccccatgataattattttaatggaatttatttcatatttgatttcttaatggtcggggattgaacttgttaaacagagcacagtagaggaatgatgttaattagtgaaatttctaatatatatatttttttctttaggagaagaaacgaatgcatcagatcaacagaatgaaccccagttaggcctgaaagaccagcaggttctagatgtaaagagctatgcacgtcttttttcaaagagcatcgagactttgagagttcatttagcagaaaagggggatggagctgagctcatatgggataaggttcgttttgacaatgtgtggcaagtacttacatgtcaaaagtgtgttttagttcttgagatgtaatagaagctagtcattttttgaatatttactagattttgaggaaatatattgatttggcttggatattttcagctctaattgctgtatggagctgaattttctgtacatgaattcaagcaatatcataaaacttcatttgggattctagtgatgtgttcagggtttataattatgttgactagaaaaataacgtgaatatattaaagtgaaatgtttcttgtgtagagtagatgtattcatagaagtcataaaatcatttggagaaaacatctcattggcctgatttgcccttgaaaatagtaagattgtctttgaattgaaatagttattactatttcagaggtctgaaagacagagctcttgatacaaaaatgagatgtaattattcttagaagttaaaatcatatttaatagtactctgcagttatgtcatcttttgagatttgatattatgaactaattttacttaattttaattgtaatcagtattttctatggctaaaagtgttttatctcatgaagcttgtatgttcctgtggtgttgaagattagtcatgggtcttaaggcataaaggccaattttagaaacctaagaaaaatttgtgtgtacatattttgaaactttggttgaatcagacatctaaatacactaaaatgaagctagtatatttagattcttgggattcttataaacattagtctcttgggttttgtgatatttaaagggtaacttttcatattttcattgttattgttatgctagtgatttgggaagtttgattagtgcacagaggctaaataaagagcccttggaatgggaattgttatcctcttgagtaaagtccacatgtaatgggtgtgataagacagctgcttagggaagacactgtgttgagtattcagtattcttagtcctcaccacaccttatgagatggggatataatttcccctatttaatagattaagagattttgactcaaggaatttgacttgcctgaggattcacagccagccaataaatacataaagaactatgctctcagtattttttcttctgttctgtgatgcctctgaattttagaccagggtgatatcttctcagttcaaagcaggaagccttgctgaaatctagagactaggatatagtctcaggaaaaatacaaatcgtaacaggaaaaacttggattgtattgccttatttgaagaaacagcatatgtgagagagtggtgcatatgaagagagtttggcaaaggggagtgaaaaagagtcatccaggtttttctgaagtgttaatgaaacagcttttttttttttttttttttaattgagacagggtctcactctgtcaccaaggctggagtgcagtggcatgatcttggcttactgcagcctctgcgtcccgggttcaagtgatcccgccacctcaggctcccgagtacctgggacgactttaggtgtgcgccaccatgcctggctaattttttgtgtttttggtggagatggggttttgccacgttgcccgggctggtcacaaactcctgagctcaggcaatctgcttgcctcaacctactaaattgcttgagactacaggcatgagccaccatgcccagcctaaaacagttttcttaaattgctcgtcttttggcctggattctgtgtttgtccagcaaccttctctttactgatgaatggaaccaggaaagggttgccattgtcagtgagtggaattgagattccggtgtatacaactgagtctccggtgcctttgtttaggctggagtgagttcctagaagctggtgattcttggtgttcttgtcagactcattactggaccagaggagctgatgatgagaccccaccccctacttaacccacctccatgctactgtgaggtcctagctgactggtctttccctcagcaacctcttgttctagtcgaaagtctatagtattataaacacgtgaaagtattgttctgaaagtaatgcttcaaaatagtcaatttgtggagaaacttgttaaattgtttaaattattggcaggatgacccatctgcaatggattttgtcacctctgctgcaaacctcaggatgcatattttcagtatgaatatgaagagtagatttgatatcaaatgtaagttatttgtactaaagttgtatcactaaaaccttgaagttgttttttaaacagtgaaacatactcatccttttttttttttcccagcaatggcagggaacattattcctgctattgctactactaatgcagtaattgctgggttgatagtattggaaggattgaagattttatcaggaaaaatagaccagtgcagaacagtgagtatttctgtttgcatttttatgcaaccccccttaaaaaaatcattaattaaaagtacattaaacagataatttttaaaatgaaaacaataaaattggtttaaagcaatggaaaagtaatttttctggttaccaagtgagtgtgtgtttaagcttcctggaaattgcaacaaaaaggaaaaattaagaagttgcttttgcttttaacatttccaattttactgaattcttcgaagaattcattgtgcggtccttatactaagaagatgtttcaactgtttttcaattctgagagtgctatatgggttttaaaatttgcttggtcattttatagtcccctgttcagtcattctcctattgagtcattcttttcaattttattgtatagtttttgataatgttaatgtctgagatctttatgggtgagtctgctgtcatttctgctatttctcgtagtgatttgcttgtatggtttatgattttttaaaaactgaatgtgtattagaattgtgtctggtaattctttagggacccattgtagatgtatttcttcaaagagcatttgtggttattatatttgggtgcttggggcactgccaatacaggaccacttttaaattaggattttcaatacctatgtattcagaccacaaacctgcacgtgccctatgttattgtcatgaattatatgggaagatactcctccccctccactaagcaccaagtttaagatcatttttatggagaaagtatttttctcctctcttttcaggtccttgctttgtgtaagggtctcctgttttaagagttcctaccttagtggtgggtggggtaggtgtatctcttaaggctaacactacttggatgttctctttggattccttccttcgatgttgtgtctgcagacacttcgctttcttaccagctcaagaaggcttcctaggaaatactagccaatactttgactgttgtttaggttctcctttttatcattgaaataaaaagacctgtttaccttcagaaatttcaaaaaatatctagtttgcaatggtactgttattttgcagtgtcattgatgcacacttacttttttttatcttttgagacggagtctagctctgttgcccaggctggagtgcagtggcacaatcttggctcactgcaacctccacctcccaggatcaagcgattctcctgtctcagcctcctcagtagctaggattacaggtgcatgccaccatgccggctaatttttgtatttttagtagagacgggtttcactatgttggttaggctggtctcgaactcctgacctcatgatccgcccacctcggcctcccaaagtgctgggattacaggcatacaggcatgagccactgcgcccggccttttttttttaaactgatggggtcttgctatgttgtccgggttggtcctgaactcctgggctcaagcagtcctcccaccttggccccccaaagtgctgggattacaggtgtgagccactgcacttggcccgatgcgctctttttttccttttctttttcttttttttttttttttttgaggtggaatcttgctctcacccaggctggagtacagtggagtacagtgatgtgatctcggctcactgcaacctccacctgctgggttctagcgattctcctgcctcagcctctcaagtagctgggattactggcacatgccaccacacctggctaatttttgtattattagtagagacggtgtttcacctgttgcccagattggtctcaaactcctggcctgaagtgatccgcccttctcagcctcccagagtactgggatttcaggcgtgagctattgcgcccagcctcgatgcactcttaaaatattttattttcatgaaatttcagtttgaaggaacagaatcaaattgcccagtctgccatcttgatttagttttctatttaaacttttattgtatatgttatatttttaatttctaagaactttattttttggtatcttttttttgagatggagtcttgctctgtcacccaggctagagtgcagtggcgcgatctcagctcactgcaacctccacctcccaagtagaagtgattctcctgcctcagcctccccagtagctgggattacaggcgggtgccaccacgcctggctaatttttgtagttttaggagagacagggttttaccatgttagccaggctggtcatgaactcctgacctcaggtgatctgcccaccttggcctcccaaagtgctagaattacaggagtgagccaccgttcctggccgatacccagtttttaaattatttaaaaaaaattttttatagcagcctgaagctgtagtatccctttgagctcaccaacagtactaattactgaacttattaaaatgtctgttatttcccatcacatccttccggtttctttgcctgcttagctccatgccactcttggactattaatagtaatatatctggccgggcacgatggctcacacgtgtaatcccagctctttgggaggccgaggcaggcagatcacctgagattggaagttcgagactagcctgactaacgtggagaaacctggtctctactaaaaaaaaaaaaaatatatatatatatatatatatatatatatatataaaattagctgggcatggtggtgcatgtttgtaatcccagctactcaggaggctgaggcaggagaatcacttgaacctgggaggcggaagttgcattaagccgagatcgcgccattgcactccagcctggcaacaagagcgaaactctgcctcaagaaaaaatatagtaatatatctggatttcatttttttacatttgcaaatgaattccagcctggattaatgttagcccaggtattaatagtggtagcaattgcttttattattgtcagtttcccttagcacacttaccttcccggtgaagcccaaaatcaaacaaatctttctccctctgtagcctgcttggcctgggcagtttgcttctagcccttccacctaccagtattcattgtacggagaagctattttacagaggacggctttagtgtctcttgagggatttagttctgtattctcaggggaatccgtagagtactcctttagaattcattcctcttagcagactcaacactacattgtagtcacaagataaaggtttgtgtctcagcttcttgtcttctgacatttgttgtttctgttggatcttgctagtgttttctaaactttagtagaagcaggagcttggagcttttcttaatttcagtgtaatttgtatatttgccttggttcttaattatttttttgtttagtattagagaaatggtaaataggtacatatactgccagaaatacatttttttccctcattatataaatgttattctaatcagaaaatttgggaaggcagtgatgttgattctagacaactgtgaaaggcactatcgttaactggagaaattaatgtgttggtcttgtcaggagattgcttgcttgataagaatagcctcagggagggacaccagctgctgatacaatgatggcaccacagattaacatgcctgtgcccttactcttgccaaatcaggttgcagaagaacgcggagtcttatataatacaaggagatgtcttttcagcaagcctagctagcctagcctttagctgattagaaaagaaggttgaggccgggcgcggtggctcacgcctgtaatcccagcactttgggaggccgaggcgggcggatcacgaggtcaggagatcgagaccatcctggctaacacggtgaaaccccgtctctactaaaaaaaaaatacaaaaaattagccgggcgaggtggcgggcgcctgtagtcccagctactcgggaggctgaggcaggagaatggcgtgaaccccagggggcggagcctgcagtgagccgagattgcgccactgcactccagcctgggcgacagcaagactccgtctcaaaaaaaaaaaaaaaaaaaaaaaaaaaaaaaaaagaaggttgaaaaaccaggttcctaaaaaggtcatgattttcctgatccattttgccatctggacgggaatttttaagtcattttttattggatatctggtaaacgagattttagattgtatggcgtataaaattacagcacgtttccgatttctgcctgttatttctcctccaaagatttttttgaataaacaaccaaacccaagaaagaagcttcttgtgccttgtgcactggatcctcccaaccccaattgttatgtatgtgccagcaagccagaggtgactgtgcggctgaatgtccataaagtgactgttctcaccttacaagacaaggtcagtgcaaggcctgggtctcttttccttttgcttttacagtattactgtgatgacaaacaaacactagctgctgattctgaaaaggtccaactgcagagatgtgtggctgtgatttcctgggttattttgccttctggattcctgcaggcttttctgtctgtggttccagaataagtgcctcacattcccagaatggagtaggagtatttgactggaatctgcagcacagtggtggcacagtatcacagcaagcagaggacttctttgctctttgcttcccaggcagtgggtaaattctgtattttttgacaaataacaggtatccttgaatggtcctcactgtggcagtgagcagataagtatttgcatgcagtgcaaagtttgcatttccagtagagcaaagccccagttaccagctttgtattaaagggtataagtaacttgcagagttttggtttctctgcgtgttggacagtgcccactcccagcaaattagggggcttttgttatttctgaggtctgagttgaggctaagtggtggtacacacttatctaatatgacctgattctgatatggtaagttagtccctgaggacatagggcatttgcacacctggattcacctctggagctgaagcgagggaagaaatgggggtttaggacatggtctggtccttaagttcctgttaaattggctagatttgtgtattaggggagattttctttttttatgacccaaaagtgtcactttccactttgggatcacttcctattgttctctggttgtgaccatcataatgctacatatttacatgcctcttgagagaggaggaagtggcccttctcaaatagcagtgctgcctgatagggaatggcctttcttccagaaactggttaggcaggacggattgatttgagcttatgttttggtcaaggaagtggcaggtacagcagcgggtggttgccccagtttcttttctaggaaataattatctttggtatctcctgattcttgagcttcaaggttattcctctatttgtaggattcttagacctatagagagttcctccttttttccttctttcttttttaggagctggtaggatttaacagaatattatcacttctctaaatgcatggaacggggagacttatctgagagtcaggttaatgagaactgattccatctatgaaacccctgccattacagggttggcacagagactgaaatgaaatatgtcaagtgtgtagctcactacctaacctgcagggaaagacaaagtagcaagagccagccagggagttcctagtcccctgttgagatgaagttggatctgatctgcatcagtggtcagatgtggggatggaactcaggtgaatccccacggctttcctgcttgctctaagggatcttgaagagtgacttcgccggtttccaataaatagaaggggaaagtaagagcctttatagaagtctaggatttcttatgatctttaattacctacgttaatattttgaatccttttttttttttttgtagatagtgaaagaaaaatttgctatggtagcaccagatgtccaaattgaagatgggaaaggaacaatcctaatatcttccgaagagggagagacggaaggtatcatacattgtatttattcattcctctcattgaggagactgcttgaagagtgcacattagttgattcatttactgtatgtgatactcagtattgcagagagtggcagtgtttggtcatgaaggtgctctttcaaggtgacattgctgggggtcatcacacttccatgtttgggaactccatgtcagacattttcagggactgcagtgctcttgtccacttccaaggaacctccttgccgatatcatggatcctgggagctaaccttgtgatgagaagactattctgtctgtcagatcacagtgggtagggttctaaggcatttggagatttttctccaagagtggggaagccttggtagcctgttcctactatatagcagaaagattattgaaattcagtgcccggttttggctttctgatctttcctttcaaaagttcaagcagttcatcccttttgctaacacatttgctatacaaggtacaatacatttgattctgttgaagctttcatagtaaggattgcatcgtagttattcctccttcagactgtactcgttgatcctatacctccttggtcacttttgcagctcatttcttgagttgctgttctcgttttttccatgtcccagtttttgccagtgtactgttattttcgaaggtttctaggccctgtgtttccctgtatattgacttaattcatacctatttgtccattggtcatttattcatactttgtgaggtcctgatggcgattcagatgttaagccttctttaaattcaggtttagtgtcaaggttcttcttggttgtagttgcttgttgagaaattttttgggctattaggtcatgtgtaattggaggccatgttttggctgtgtggtgctctattttaggagtctacttgagtattcaagcctcattctagccagctgacttttaaaaaaatgtttgtttgtgattatatgctgtcccttagttgtagccagctctttcaaatgctagcttaaaaatggaaactggtcaggaatttcagtggcttcagcgtgacccttctgtacggaatacatgtggtatggagggtgagacagcacttaccagaatatgtgtggagtcctgtatgacaggcatagttttgggtattcataagtcaaggatgaataagacaacagaccttggcttgaagtgccttgcagcctggaagaagggagattgtcaacagctggattgagcatcgtccaaggaaaactagaaagagtgtgtacacagtatgaatctaaggaaagtatattcagctttgtgaaacggagggggagtaataggagagggagtactcttgggtcagtttttgaagtagtagtgaggactccctggacaaagaagagagcatttagacagaatgaacatctgtctacaaaggtgtgaacttgtgaaacaacctaaactgccttgggagtggcccattatttggtttcgctggaagttggggtgctgaggggttggcagcagtggtgaggttgaagtctttcttgtcacatgtgcagtgtgtgtcttcctcctctcccttgacccctaccctccagaggaaggggcagtatttcactgccacctgccaccagggtttaaacaggggagtagcagggagctattagggaggaggggattgagggatttttactaaggcagaggcaggtgatagatttgagatttgcaaagtcagaacttggagcccagttgaggaatagcattacaatgttagcagcgttgttaggcgagcacaagacttcacaggtgatgctagttcaccaaaatgtgaacccacattaactggttttccttttgaatgtgatggttccaagaggtttgcagtcagtggagatgtgtgaaagggcttggaggtggaaatctgggtaagaatgccaagggcattcctggtagattaaaatggtaaagcaagcaacagatctggaaaagaactaggagaaactgttagtattttctgggtgtcaacgtagggaaaggcgttctaagcgttttccttataaataatgaaaaaatgttaaaaagccaaaaaaaaagtggggggagactgaaaattgagattatatagaaaattgggcttggtgcactggctcacacctctaatcctagcactttgaggggccgaggcgggcagatcacttgaggccaggagtttgagaccagcctggccaacatggcaaaacctcatctcttgtaaaaatacaaaaattaggccgggcgttgtagctgtaatgccagcactttgggaggccgaggtgggtggatcacctgaggtcaggagttggagaccagcttggccaatatggcaaaaccctgtctctactaaaaatacaaaaattagccaggcatggtggagggggtgcatttaatcccagctattcgggaggctaaggcaggagaatcgcctgaacctgggaggtggaggttgcagtgagccaagatggtgccactgcactccagcctggacaacagagtgagactctgtctcaaaaaaaaaaaaaagaaagaaaattagttaggcatggtggtgcacacctgtagtcccagctattctggaggctgaggtaggaagactgctcaagtctgggatgcactctggcctgtgtgacacggtgagaccctgtctttaaaaaaaattgatttgaatggggaaaagttttcagaatttctcagtttggtccccctgaagtagtttcggtagttaagtgttttaagactgaattcccagcgttttaatgttttagggtactagggcctccataacaaataccacaacccaggtggcttaaacaacagaaatttatattctcacagttctggaggctggaacaccaagatgaaggtgctggcaggtttgttttattttaaaacctctctcctttgcttgcagatagctgcctttctgttgtgtcacatagcctttcctctaggggtgcacatccctgatgtctctgtccagattttgggattgattgattgattgattgattgactggagacagagtcctaaaaattttttttgctgctctgttgcctagcaggctggagtgcagtggtacagtcacacgcctcactgtgtaactcctgggcttcaggaatcaatccttccctggcctcccaaagtgctgagattatagatgtgagctactgtgcctgccttcctcctcctataaggacatcagtcagatcagattagagcccaccctacttgccccatttaaatttaatcattcctttaaaaagtcttatctccaaatacaatcagattctgagatactggggattagggtttcaacctttggattttggtgaacgggacacaaatcagcccataacagaggtttagctttttaaaaaatcaacctgactgctctatgaagatgtaactgaagtatctaaattattcacgtttcctagctaataatcacaagaagttgtcagaatttggaattagaaatggcagccggcttcaagcagatgacttcctccaggactatactttattgatcaacatccttcataggtaagagctattagtattttaattgtaagaaattatttgaatatataaactttagacaaaatgaaggaaaagtgttttcttatccttaaaccctgctgttcatttgaaactgtatagtatatttggttgagttggtcactgagttccgtgatgtttgacctacagaaaaatttgaggattcagaaattggcggggtgtggcggatcacctgaggtcaggagttcgagaccaacctggccaacacggtgaaaccccgtctctgctaaaaatgcaaaaattagccgggcatagtggcaggcgcctgtagtcccagctacttgggaggctaaggtaggagaatcccttgaacccgagaggtggaggttgcagtcagccgggatcgcgccattgcactccaacctgggagacagagtgagactccaacttaaaaaaaaaaaaaagaaaaccagaaataaaagaaataagcaaaaaatgttttaagagtaactgtcatcagtggtggcttatcagaaagacctagagtccaggtgtttgaacagtttaaacagaggcaaattcattgtagtaattaaactggaataaaattattaattatttttcaaggttctctagaaaaaaatatttcttccataaaacaaatcatttcgtttgtgattttgtggcaataacaaaagaatattgggaattgtctgtactggctgggcatggtggctcacacctgtaatcccagcattttgggaggtcgaggcgggtggatcacctgagatcaggagtttgagaccagcctggccaaaggctggtggtggcgcatgcctgtaatcccagaaacttaggaggcagaggttgcagtgagccaagattgcgtcattgcactccaggctgggtgacaagagcaaaactccatctcaaaaaaaaaggaattgtctgtacagattcctgagtctatagcacagttaagatagacatggccccctattctgatatattcatgtgttgaccagggtgcatttttgttcatgctcattgacatggtggaactgtgcctgacttgagatttatgggtagcatctaacaaacataaagggtttagtggtgctgccacctgcgtccagttattttgtcaatattttcatgagtatacaaacatgcatagtgttggtgtggttatttggagagaactacatttcatactttgtttataaaaagcataaaatgacaggaaggaggccaggtgcgatggctcatgtctgtgatcccagcactttgggaggctgaggcgggtggatcacgaggtcaggagttcaagaccagcctgaccaacatggtgaaaccccgtctctactaaaaatacaaaaattagctgggtgtggtggcatgtgcctgcagtcccagctactcaggaggctgaggcgggagaattgtttgaaccggggagccgagtttgcagtgagccgagattgcgccattgcactccagcctgggcgacagagggggactccatgtcagaaaaaaaaaaaaaaatgacaggaaggactgaatgtgagttattagtaagtagtgtatttcacagttagataatggagtcaaagtggtcctgcttcagttggacactagatataagtggcatgcttgttttcacttgtgaaagaaaagacagtggaaggacatgtacaataaagtggaaataccacaaggtatctaaaagaggaggcataattagggtttttaatcatattttttagctctctgggaacagaaccccaccccttaaaacgtgtgtcttttgtttgacttaaatgtttctgatgtttttgggagttcatgtacagaagcatggtgtagcttgtaaagatggggggacccagaaatcatgtagttctgcccataagacaccacattactatagttaagatcacattgtaggccaggcgtgacggctcacacctgtaatcccagcactttgggaggctgaggcgggcggatcacaggctcaggggttcaaaaccagcctagccaatatggtgaaaccctgtctctactaaaaatacaaaaaaattagccaggtgtggtggcgcgcctatagtcccagctgcttgggaggctgaggcagaagaatagcttgaaaacctgggaggtagaggttgcagtgaaccgagatcacgctactgcactctagcctgggtgacagagtgagactccgtctcgaaaaaaagaaaaagatcacattgtaagtagaggatgtagaaatctttttttggcattgtagctaaagaaataatgtccaagagttgctttaggccaccaagctttggacccagttttatgcttcagcaataaaagttatttactgttttaaagaaacaaaaaaccaaaaccttgccctgatttgaaagtgcatgtagagtttttgattatcacagaaatttgttgtgtaccgtcttttttattataagttcagtgctttgaaaattagaatccaaggtgggtatggttggctcacgcctgtaatcccagcactttaggagaccaaggtgggaggatggcttgagcccaagatttcaagaccagcctgggcaacattatgagaccctatctctcatttttttttaaataaaaattaaaaaaaaaattagaatccacatatttggtgtatacatagtgtatgctttgaggaacaacaggatttctctggtgctcctttgctttctaaatagtcatagcagtgacctgtgtgattctcctacagtgaagacctaggaaaggacgttgaatttgaagttgttggtgatgccccggaaaaagtggggcccaaacaagctgaagatgctgccaaaagcataaccaatggcagtgatgatggagctcagccctccacctccacaggtgagtatggccccagccagcaggttgttaaatacccacaaagcagaagtaaaaacaaactgattattaggaacattgaccataaatccataaaactactagaggtgtgtattggtttggtattgattgttgtaatggagctttgaatttatgaaccatgaagacatttaaggctgggtgtggtggcttacacctgtaatcccagcactttgagaggccaagatgggagtattacttgaggccaggagttggagaacagcctgggcaacacaatgagagacccccatctctacaaagaaaaaaaaaaattaaccacgcatggtagcgtgtacctgtagtctccgctactcaggaggctgaagtggttcacttgaacccaggagttcgacactgcagtgagccatgattgcaccactgcactgcagcctgggcaacagcaagaccatgtctcaaaaaaaaaaaaaaaaaagtcatttaaggcctggcatggtggctcacacctgtaaccccaacgctttgggaggccgaggcgggcagatcgcctgagctcaggagtttgacactaacctgggcaacacagggaaatcccatctgtactaaaaatacaaaaaattagctgggcgtggcagcatgcgtctgtagtcccagctactcgggaggctgaggcaggaggcggaggttgcagtgagctgggatcgcgccactgcactccatccagcctgggtgacagagcgaggcttccggctccaaacaaacaagtcatttaagactgggggaaattcttatggaaatttcttacagaaaataagaacactttgttattttttgttaattggtttttaacagtttgaaatgatagtttactagtgtgcaaagtcagcctatgtagtagcaggttggggttttgtatgcttgttttaaggagcaataaatccatgcatctgactattttgagtgaacaggtgcttgttaagtatggaatttaggcatgttagagtttccttgtcaccagtatgacttgggtatagtcctttcccctggattttcagtgctggtgcttggtatttttccaaataactgattgtttactgtattctgatttgaatatttactcctctccctttcttcctttagttaggaaactaaaggttaccagattttgacttctttgttttcatttctttgaccctatgtctgtggcattctttggaatatgtttactcttggctctaatgttctcttgagaattttggagacgaacattcagattatggcctgggtcattggttcataacctgttttttcccccctcactgaaattagaaaggtccgtcatcttcctttgaggaagagactatctggtagattttccaaaatcataatttgaaatgtacatttattgattctctactgtgggtaggtttccaaggttacagccatgagtaagataggtattctgcctttgattttgttggacgaggagataaaaccacctttagtatcagttctgcattggggatggttcctggcttcatcctctgctactatgtaagcttgggaagtcattcactgagtttcctttcctggaaagcagatactcatgtgatcttctttatagggttgtgatgattaaatgagttgtcatatgcacagtgctcagaacagttcctggcacattgtaagtgctgtattgttgttgctattgttaccactactaccattattagaatatgtaccctctgcttttctattggagaatgtggaggtagaatcaaggatgtgtaatgagtactttgagttacataatgcttgtcacaattttttgttttgattagaaaataaataggttcttatataaaacatttaaaacagtatggaaatacgtaatgtgtaaagtgaaaatgcagccattcttaagtctggtgtgtattagaagagtcagctttcaattatagaaaatacaggtgagcacaggtaactcccacgcttttacccattttctttttcccttttttctgaaataagctcaagagcaagatgacgttctcatagttgattcagatgaagaagattcttcaaataatgccgacgtcagtgaagaagagagaagccgcaagaggaaattagatgagaaagagaatctcagtgcaaagaggtcacgtatagaacagaaggaagagcttgatgatgtcatagcattagattgaacagaaatgcctctaaacagaaccctcttactatttagtttatctgggcagaaccagattgttatgtcctttgttccaaagggaaaaaattgacagcagtgacttgaaaatgattctgctccctttgaaagcattcattttgctagaactgttagacacattgcagtatgctgtattgaaagtaggaatatagttttaaaaaccctttgaacaaagtgtgtgcataaccagtcatgagataaaacaacacaatgcatgttgcctttttaatgtaaatacccgtaggtatcattaatagtttcaaaatattgtggtttagtaaagttgatacctggttataaatattatgcctttatttttggctagaagaagaattatttttagcctagatctaaccattttcatactcttaactgattgaaacagattcaaagaagtatcgagtgctatgcattgaaacttgtttttaaatgttagatggcactatgtatattaatgtaaaacaatgttaatttactcaagttttcagtttgtaccgcctggtatgtctgtgtaagaagccaatttttgtgtattgttacagtttcaggttatttatattcgatgttttgtaaaactcaaataacgactatacttatggaccaaataaatggcatctgcattcttgttacacatgcctgcacagttcctgtttctgctgccttatatctactgcaggaatgtcaaattcttttcattaaaaaaagaactcggtcgggcacggtggctcatgcctgtaatcccagcactttggaaggctgaggcaggtggatcacctgaggtcagtagttcaagaccaacctggtcaacatggtgaaaccccatctctactaaaaaaaaaaaaaaaaattagccgggcctggtggcaggcacctgtaattccagctactcaggaggctaaggcagcagaattgcttgaacccgggaggcagaggttgcagtgagccaagattgtgctattgctactccagccagggcgatgagtgaaactccatctcaaaaaaggttcagaagatctccactgtttgccaaagacgagtactttcttttctttattcttggagacttcacatgtaggaagagtactttctaaaataaagctcttcctgcgtgtggtggtggtgcacatctgtgttccagctactcaggaggctgaggcaggaggatggctggagcccagaagttcaaggccagcctgggtaacatagcaagaccctgtctctaaaaaataagtaaataaaataaagcttttaatggcagtgggttttttgttcgtttttgagatgaagcctcacactgtcatctggcctggagtgcagtggcgcgatcctggctcactgcagcctccgccttccaggtgcaagcgattctcctgtctcagcctcccctgtagctgggattacaggcgccctccaccacgctcagctaattttttgtatttttagtagagatggggtttcactatgttggccaggctggtctggaactcctgacctcgtgatccacctgcctcagcctcccaaagtgctgggattacaggcgtgagccactgcgcctggcctaatggcagtgtttttaaaatttggattgtcagcagttggcctttgttgagaaaatgtgtgactttgcccaagcccagtaacttggagccttgaatttgagatgctggaaagggagtccttcctcctttctgcagtgtttgtctgggttgtcccctagtttaccaaagtccattttgaatgtaccatccccagcccaactccagcctacagatagtgccagaccgccagtaggtggagtagcactgtcttcctggtcccggacctcagagggctttgcctgttagggtactcttatcactcagagatgggccttgagttttcagagaacagaaagccattaagctgtttcccctattgtattcatgtgccctttgtgtttctggcaataatttattttatatttcaactaaattttaaatttctaattcatgtattgttccttgtgtaatttgtactgtaccattcagcttattaaccattactccttgttttccaccatttgtaaattcagcatgtaatcagagctttcagaaaaaccatgtagaagactgggtgtggtggctcacacccataagccttgcactttgagaggctgaggcaggaggatcgtttgagcccaggagtttgagaccagcctgagcaacatggcaaaaccccatctctacaaaaaatacaaaaagtagctgagcctggtggcacttgcctgtagccccagctattcgggaggctgatggaggaggatcgcttgagcctgggaggcggggtgtgcagtgagccaagattgtaccactgtacttcagactgggtgacagaatgagaccctgtctctgaaaagaaaaaaaaagtcatgttgactaagactcagccttctggagccccagagtggagtgactttcacctgtgagcttcatctgcctttaggtttttagaaggtgtttaattttcctccagaaaataatttgaaacttaactatgtaatataaaatgaaatatcttaggatgccgtctcactcttcaaactttttattctgaaaagctctctagaaatttgattttgaaattctgtccattcttacacatcatcctgcctgcctttatttttgcagtggtgccgtcataggtcactgcagccttgacctcctggcttcaagcaattctccctccccagcctcctaagtccctggaactacaggagctcaccaccatgcccagctaatttttaaaacttcttttgtggagacggtctcacgttgcccaggcttgtctccaactcctggcctcaagcgatcctcccaccttggccttgccaagtactgggattataggccctgagccgcgtgccctgtcctcaccctgctttgtagacacagttaacaatgtgttcccgatattttgtgtatgttcttttgttctttcctatttgaatgtatagtgcatgatgataagtgccagttaggtctgcggagttgtttctaatttggcagaccagtgtttttcatctttgcattaactattactacctttttcagcaggtttgttaggaaggcaggtctgactactagttgcagggatcctgtacaactagacagtgtaccaaagcaaatccaagctttccctaggtgcctagagggtggagacacttcagatcttgtgttgtattcatggtttttccatgtaaattgtctcaccagctgggagctgggagtagggcttgcaaagggagtttcctcaacagcttctttccacctccagcctgaaatatggtgttgacaaactgtcttccagcctcacttggaacagtgtggtgacaagtttacctagagaatccattgtcctgaagactactggctgctcagcatgtgccatgagaggttccaacattttaacccattaatgagataactgaccaggcaaagatcactggatgccaaaacctttcaggtaaaaggctgctgaggaacagaattttagcacaacactcaaatgttgctgcacaggtcacttgcaaaaggaaaacatcaatctttacttattttagagaggggcgtctcgctttgtcccccaggccggagtgcagtgatgtgatcacagctcactgcagcctcgacttctcaggctcaagtgatcttcccacctcagcacccctgagtagctgggactgcagatgtgagccaccacgcctaatttggaaaacaccaatcttcacaattgacagatctgactgccgccaccataatcaagtgatcaaacctagtgtcacttatgggacggcctgatgtttctgtgcttcctaagatgataccaagaacacagcagtatctcaccaagaaattgttgactggaatctaaccaagcatctagacctccagctgacaggaaatggagagggggtagaggcacaagttaacatttagaaacaatcaggtgagcagaatatctgtgatattccgtaactgccagggctcttcagtaagtgtcatttcaaaaaaggaaggagtaggcattctggggttaaaagacatttaagagacaacccaatacaatgtatgaataattttttttgcatcctagttcaacaaaaatgactataacaattcttgtaacaattggaaatttgaaaatgaaacgaatataggtaatatagaattgttttcttcagtacgataatgtgattgtaattatgttctttttagtgtattatgggcaaatcttcaataccagcaactttttttttttttgagacgtacttgctctggtgcccaggctggagtaaagtggtataatcatagctcattgcagcctcaaactcctgggctcgagcgatcctcctccctcagcctcccacgtagctgggactgcaggtgttacgccaccacgcctggctaattttttcaattttttgtagaaggggttttgctctgttgcccaggctggtctgaaagtcctgggctaaagcgatcttccctccttggcctcccccaaagtgctgggattacagttgtgagccactgcacctttctcaggctatatggggaggaaaacagcaaaattaacatttattgaacctaggtactgtgtgtgtttcattgtaccattcagctttgaaaactttcataatagaagtgaatatatgtatatatatgcacacacgcacaaatgcatatatacatacacaggcagtctattttccttttgtgcctatttgacttttccaagttttatattgagtatgtcctatgattaaagtcagaaaggcaataaaggttattaaacatataaggtggaaagagaaagtgttagtgggattctgggctcaacactgttgaagtcagctttacccatccttcttgttgctaggctgtgacttaggaaggattctctttcatttgagcctccagagaactaagccaggtggttcccactagatgaatggcccactcagaggctgccagacagcatttagttgataatagatgttcctgaaaattgtccatcagtggcatacatgtctgacgtggacttggcctacacccaaggaacatggccaaatgtaagccacttaccagccttttgtaatatacaaaaaccaaaaatgtgggccaggtgaggtggcccatgcctgtaatcccagcactttgggaggctgaggcagatagatcgcttgaggccaggagttcgagaccagtctggccaacatgatgaaaccccatctctactaaaaaaatagaaaaattagctgggtgtggtggtgcacacctgtaatcccagctacttgggaggctgaggcatgtgagttgcttgaacccgggaggcagaggttgcagtcagctgagatggtgtcattgtgctccagcctgggtgacagagtgagactgtctcaaaaaaaaataaatacatgaataaataaataaaataaaaatgtgaaaagtaaagaaaacccaaaaagatcagagaagaaaaaatgtcagcagatgtttctagtcattgtgacatgtagaggtagggaggacctcctgtttctttgcattttaaagcaatattcctgaggtccatttgaccattttgagggaggatatatttagagaagtatttttatttcacactgggagcacattatttgcattgtgctcacagaaggaacattttctttttcctgcatccaattcaaaacacattgcatccaaaagcttatttgaaaaattttagaactcaaactaaaaaaattaaaaatcaacagttgaactacggggctacaacgccactgtgtagtttggctatgttttgaagacaattatctcctggtaaagtaacattttaggaagttttgctaaatgtctctgactcatgccagttttaaaaattttaagtctagcaacaagtgatgactcacagattgggaaagattctgagcaaaagctttaccagaacgtacagcgtctgagaaggtcctcaggctttgcactttagagtctttcaatggtttactttgattctcagatcaaccagtctcaggaaatttaggcactgtgcagacgatgtcattcagccattctgtcaacacaaattgcagtgctgcactcggtggaaaacgttaccactgttgccagcctgggtggaaacctttgaaagcacaatgaactaaagactggcgtgaatgaaaacccaactcctcatgtcattttgacagcagtaggtggtgagttggagatctgagcacccacaccctgtgtgctgccacactgagaggcagatgtcccagttggttatagcagcagcttccgggaggtttggaagtcataaacaccaacctcatactgaaaagcctaatgccaggttgggcatggtggctcatgcctgtaatcctagcaccttgggaggctgaggcaggaggatcatctgagcccaggagttcaagaccagcctgggcaacatagtgagaccctatcactacaataaataaaaaattagccaggcatggtggcatgtgtctgtggtcccagctacttgagaggctcaggtgggaggatcacttaagccaggaagttgaggctgaggtgtgatcacagcactgcagcctggccaagagagtgagaccctgtctcaaaaaataataataccaaaagctccattaatctgggcatccccaaataggtcctccccattgagctgtagattggctggggttttttaccatggtacaaagttagggcagaaattcccattcctgcgtgcatggtaaggcttcaagacaagaaaagagggcctttgccagatgcagtggtttgtacctggaatcccagcacttggggaggtcaaggcaggaggattgcttgagtccaggaatttgggcaacatggtgaaacctcactctacgaaaaacaacaacaacaacaacaaaaattagtttggcatggtggcatgcgcctatagtcctagctaacctggaggctgaggtgggaggatcactggagaccaggagctcgaagctgcagggagctgagccatgatcgcatcactgcactccagcctggatgacagggtgggatcatgttacagacacacacacacaccaaacaaacagcaacaacaaaaaacaaaaacccccatggaaacaggaaggaagcaagctgcaagtatcatgtcttagccttaattcttagattggttccccaatctatccatggcttcagtgatcaatgctttgaatcttcttgcatcctcaggcctaaaggggataacaggaccaggagagattgaagttaggctcaatctggcagaaagagtggggcctcagagaagaggggttgaaaaaattcccttgggtgcccagcctggtattatatttttgagtatgaggttggtttctatgactcttagagctcctggaagctgcctctcagcgtggcagcacacaggatgggtgctcagagaagaggggatggaaaaagccctcccagtggataggacagaacgtgcatcttgagcctggtgctgtgtgtgggaggagtggcccccaggagctgagctggaaaggtgtgtgtgcttcaggtgagagactggtgctggaaattcgacaagggtaaaaactgtcataggctaaggagaaagaagtgtgggtcccagaaacttcctgtggagtttggctgccattccccttccctcataacccgttatccagtcacagctgattgataagtggcctaggactccatgagaaaacccctgaattctgtcaatacctggggtccatacagtacagacaattaaggaggtctaatggaagctagattacaaggaggggcatgaggggctccttaaaaaatcaccattgtaggctgggcttggtggctcacgcctgtaatcccagcactctgggaggccgaggcgggtggatcacctgaggtcaggagtttgagaccagcctggccaacatggtgaaaccccgtctctccaaaaaaaaaaaaaaaaaaaaaaaaaaaaaatatatatatatatatatatatagacacacacacacacacacatacatatacatatatatacacatatatatacatacatatatatacacacacatacatatatatacacacacatacacacacacacacacgtgcacacacaaaagttagccaggcatggtggtggatgcctgtaattccagctacttgggaggctgaggcaggagaatggcttgaacctgggaggcggaggttgcagtggttgcggtgagccgatatcacgccattgcactccagcctaggcaacaagaatgaaactccgtctcaaaacaaaaaacaaacaaaaaatcaccatggcgtggacagagtctgggtagggtcagctcctgggttctgggaagatgatgatgatgatggttcaggacatggtgcaagactagattgaacatgtcctgttctggcctccaagtgtgtctttgcttaacaaagggaagaccagttaacttgagaggatgataaactggaagccacagtgtagtgaaacccctcctttggaacagtgggactcaggcagcggtgtgtggagccagcttatcccagcttgcaagaactggttatacccatttctttccagctcagttcagtggccccatctttatagcttgaaattggccatgctgggagtatttataccatggtaattggcaaatgctacacatcagggctcctgatttatacaaattcctccccagagagctggttgttagacatttaccagcacaccactggactcaggaggaaaatgcccagagagaggtgaacacaaagaacattcctgcaacaggggaggacagagggggaatcagtgggggctggacattgagtccatggacagtgctttaaatcccttgagagagccccatccccatccttctcctggactgtgcatctcagacagaaggagccagtctgttgagatcactcaatacccctggagtgaggagatagaagatggggtcagggggacatttgggtaatgtagagatgagaccccacaattctgcagactacttcaaatccacctaacatcacaatagtctgattcccaagccattcattaaatcttttgaatataactgcttaatgtatttcccacttcaaggatgtacttaaactattctaatggtaaatatcaaacattttaggttgtttctgggttttgtagttgtcatttattactagtagagcaagtaataggttttagctgaccctggatgtgaatatagtttaaatcttgaaagctctaagtgggcaggtggggaaagaacagttgttattattattattattattattattattattattattattattattattctggaggcagggtattgctgtgtcacccaggctggaatgcagtggtgtcatcttggctcactgcaacctctgcctcctgggttcaagcgattcttgtgcctcagcctcccaagtagctgggattacaggcgtgcacgactacacccagctaatttttgtatttgtattttaatagagacagggtttcgctatgttggccaggctggtctcaaactcctgagctcaagtgatccgcccgtctcagcctcccagtgttctgggattacaggagtgagccaccgtgcccagccagaacagttattaaatacttgactttattgtttttgtagagacagggtcttgctctgtcacccaggctagagtgtggtggcacagttatagctcactgtaacctcagactcctgggctcaagtaatcctcccgcctctgtctcccgaacagctgaactacaagtgcccgtcaccgcgccagtttaattttttgttttttattgtagagatgaatctcgttctgttgtctaggctgaagtgcagtggtgccctcactgctcactgtagccttgacctcctgggctcaagcatcctcccgccttagattcccaaaatacctgggactacaggcatgtgccaccattggcagctaatttttaatgttttgtagggatggaatctcactatgtttcccagactggtcttgaactcttggccttaagcaatcctcccatactggcctctcaaagcactgggattacatcacactcagcccaacagctgcctttaaatgcagagagctccctttgagcatcttttcagaaggctggagatcctaggacagaatagatcaggggtccccaacccctgggccacagaccagtataccaccgcctgttaggaactgggccacacagcaggaggtgagcagaggcgagggagcattaccacctgagtcccaccacgattctcacagaagcacgaagcctattgtgaactgcgcatgcgaaggacctaggctgtgtgctccttatgagaatctaatgcctgatgatctgtcactgtctcccatcacccccagatgggaccgtctagttgcaggaaaacaagcacagggctcccactctttctatggtatagtgagttgtataattatttcattatatattacaatgtaataataatagaaataaagtgcacaataaatataatgcccttgaatcatcctgaagccattcccaccctccccatccctgtctgtggaaaaattgtcttccacaaaaccagtccctggtgccaaaaaggttggggaccgctgtagattacctaaatgatgttgggattatacgacacggttgtgattggattattgtctgcatttttgataacttcccttgaatagatgtttagcagcagtattactgcttctaagtttcgtgttcgtttgtgcggatgttgacaccgccaaactgctcttcccaaaaggatatcccaatttgcactcataccagtagcatatgtgcaactgtttcaccacagtcctgccaatattgtaatttttaaatagtagataatgcagtccatgaaatgtgatatgactgaactggcttttcctttctcatttgaaaggtagaccatttttcatgtcctggcttccctgggtatttgctctcccaaatgctggcttctagaccccgcacggagtctcatgcctgtaatctcagcgttttgtgtggtggtgtgcgcctgtactcctacgtactcaggagtccgaggtgggaggattgcttgagcccaggaggttgagactctggggtgtgtgtgatcactgtgagctgtgatcacaccactgtactccagcctgggggacagagcgacaccttgtctgaaaaaaacaaaacagcgcaactcccccaccctccgcgcacacgaaatgcttgcttccacttcccctaccctggtggggcaggggctggaactccgcaggctatgggaaggtgctggggttagcggccccagcgggtgctcagtggtgttgaggccacactgccctgggcggtctggccgggacagttcccgtgcgggctccctgcgcgctgagccactgtaggcgccttcccgaaaatctctgagcagagagggcctggaaaacagtactctctcacgcaacacttttcttggatccatcaggccctgacagataacggtttggttttcttccctatagccgtgtgacttgtacaagggattttagttgtgtccttgggcacgaagccctagtcacctctcgattccccacctatgtggcccctatggccccgctggttccaggacctcccctcgaagcctcacccaccaccctggatgcaggtgctggaaaagggaggagtccccatatttcacggggactgcctgtgatggccacaggggaggctcgccgcccaccggctctgagcctgaggcctgcttctagcctggccttgggggcctgggcgaagcgacccagcgcgaggaccagtccccaaccaacccgctcctagttctgggcgccttccccagcagtcagatgggggcttcagaggccggtgcgcggccacatggccccgggccaggcagggggtcgtggggacgcatctgcgctaggcgcacagtattcctgggcgcgggacgggcgaagcgccgtgggttccaagctgagctgggtcggccctgcagcgccggagagcaaggcggcgcagggaagggagatggggcgggatgtggggaaagctgtcgactgcttggatctctccggcccggatggcgccagctgcctccagctcagcctgcggaaatccgagctcttcccagcggcccgacggcccgggcgccccgcagaccctgggctctccccgcggtgcctccgccgcccgcccctgcgtcctggcccggcctccacgcccctccgaggtcccggcgcagcgcggccgccgccactccccccacattccagaggccgcagcgccgtctccttcctcgcattcctgcccccgcaaaggagtccctccgccccgcgcgaggccgcggcgaggagggggcgcggcccggcgcctgggagcttacattcctccgccgcgcgcgccgccgagcagggcgccgcgtcccccggcccgcgcgtggccgccggaacgaccccggcccggcgccggccccgccccgccccgcgcccaggggtcccggggcgggctccgggcttcgggcggacgatgcggcggcccggccggagcggcggcgggaagcggaggcggaggtgacgcgccagggccggcgggccgggccatgcagcgctccagggcgggcgcggacgaggcggccctactcctggccgggctggccctgcgggagctggagcccgggtgcggctctcccggtcgggggcggcgggggccgcggcctgggcctggagacgaggcggcgcccgcgctgggccgcagagggaagggcagcggcggccccgaggccggggcggacggactgagccgcggggagcggggtccccggcgcgcggcggttccggagctcagcgcgcagcctgcgggcagcccacgggccagcctggcggggtccgacggcggcggcggtggcggcagcgcccgatccagcggcatcagcctgggctacgaccagcgccacggcagcccgcgctccggtcgctcggacccgcgtcccggtcccgggccgccttcggtgggcagcgcccgctccagcgtttccagcctcggctcccggggctcggccggcgcctacgctgacttcctcccgcccggcgcctgccccgcgcccgctcgctccccggagcctgcggggccggctcccttcccgctgcctgcactcccgctgccccctggccgggagggcggcccaagcgcggccgagcggcggctggaggcgctcacccgggagctggagcgggcgctcgaggcgcgcacggcgcgggactacttcggtgagctcgctcggcccggcagttccctgcgcgcatggctggggtccggggttccgagactgcctcgggtaggcggccggatcagcggaggagagcacggggctggctgggggtgcagcagtgcacggggttgggacgaggaaggtgcatcccctggggactggggagcgcaaagggtgagtgagtgcgcctggatccccagcagcggcttcacccctgcctctgggtcccccgacacacgaggggttctggccgagtgagttgatgtgcggttcctaacttaacaggcaagtcaggttcatgggcacactgagccattttctgataattttttcttctttcttcttttttttttttctttcttcttttttttttttttttgagacagggtcttcctctgtcgccgagactggagtgcagcggcgcgtcctcggcttactgtagccgtcgcctctcaagctgaagcgatcctctcgcctcagcctcccgagaagctgggactacaggtgcacaccaccatgcccagcttttcttcttcttactttttttttttttttttttttgtagagacagagtctccctatgttgcccaggctggtcttaaactcctgggctcaagcgatccgccctcctcggcctcccaaggtgctaggattacaggcttgagccagtgcgcccggcctgatcttttcttctttgcgtttggtgctctcattctatctgatcctttcatgcttcgtgatgagcagaaaggggtgcttccccgtctgccccgccacggtatgggtgtggacagcaaccgggagatggagtggcccaggtaccaccggataccgcctgacccaggctttggtgatggtagcggctggagagggagactgtgtgagggaagaaaagcccactttgcgggagaggggaaccgtgccagtcacacggggctgccctcgcccggactgtgctgtggacataggatgtttcctaaaggaatcctgctgcaggtgcatctgcaaagcccagcagcctcacagcctccacttcccagtgtggcccaggccccctgatctctagttcttgggacagctcttggggtgagattgtgagcggggcagaggtatactgtggggcctggggcgagaacttcccaacccgccttctgtattaagcacctggctttggtggatggatggtcaccatgcctgggaccgtggctgtcctggggtttgtgtctttgagcgttcaatggtgtcagcagctcacggctgccctgaactggatcttttttttttttttttttttttttttttgagacggaatctcgctctgtcgccaggctggagtgcagtggcgtgatcttggctcactgcaacctccgactccctggttcaagcgattctcctgcctcagcctccccagtagctgggattacaggcatgcgccaccacgcccagctaatttttgtatttttagtagaggcggggtttcaccatgttggccaggatggtcttgatctcctgacctcatgatccgcctgcctcagcctcccaaaatgttgggattacaggcgtgagccaccgtgcccggccctgaactggatcttgaggggtgaggagtctgtcagtgaggggccaggtgggggcattccagagagagggaagaatgagcagaggaggccaggcgggatgagagattgccccgctcttccccctggggttgcagcccagagggctcaggtggtcgagggcatatgtgggctaagaggaggtgcgcctgctttgggatggagagcgcctcccatctgtgaggtcatggtgagactctgtggctgggcaggtctcgtggcgcctgttggatggcctgggagcagggagatgtgccaggagctgtcatctcccgtgtcaggcaggtgccaggaagagaggctggggctgagttttgaagggcatgctttccagtgccctctgcaggggagagtgcccatttcccggcccctgtgtactgcagagcccgggggaggggggtgttctgtagacacccctgaatctttatatgatataggggtggctgaggtcccaggcaggtaatgtggagatgatacaagaaggtagggtgtggtggcacattttttttctgaggagctgctaggccgggtgcggtggctcacacctgtaatcccagcactttgggaggctgaggtgggaggagcacttgaacccaggagttccaggctgcaacgagctatgatcgtgccactgcactctggcctggatgacagagtgagatcctgtcttttctttaaaaaaaaaaaaaaaaaaaagctgctcagatcgggctgttgtagcgccctgagagtgttagaggagtgatgatagaccttttttattttgttttcaagaaaaactagaaattgagattcagtaatactttcctgattttgtttactttatttttttaaacttttttgagacggagtcttgctctgtcgcccaggctggagtgcaatggtgcgatctcagctcactgcagcctccacctccgggttcaagtgattctcctggctcagcctccccagtagctgggattacaggtgcgtaccgccatgcccggctaatttttgtatttttagtagagatgaggtttcaccatgttggccaggcttgtctcgagtttctgacctcaggtgatccacctgcctcggcctctcaaagtgctgggattacaggtgtgagccaccatgcccggcccactttcctgattttaaaaaatatgggcaactatttgtttgaactatatggttctgatgatatttgactttgttgagctacaaaagtggcagtttcatagagttcaaccagaataatacagcattttacaaaagaaaatctgcaggtagcataagctcgagtgatctctgataaacctcgtcctcagagtgtggcttttttgttttaaattaatttttttttttttttagagacagggtctcaccctctcacctaggctggagtgcagtggtgagatcagcgctcattgcagccttgaactcctgggcttaagcaatcctcctgcttcagcctcctgagtagctgagaccacaggtgtgcatcaccatgctcggctacatttttttatgttttgtagacctgagatcttgctttgttgtccaggctggtcttgaacttctggattcaggcgatcctccctctttggcttcccagtgttgggattacaggcgggagccactacgcctggccagagctttttttctctctgtccaacccctcatctcttcctgtccttggccctggtaccagctgacctcttggttgctctctgccattcactgatgtctttggaactttcccctctcccctccccaagttccgctgccattagccagccaacagccttgggcttccggaaccttttcaactttggtgacctccttgccttctcttcagccacccactcccagggccacaccgttttcccttcactctagcagtccttagtggtaactccagtctgcttctcagcagttcctctcattcctgtaatcgccgtctgcccagcagaaccccgactctgagcccatgctttgaccccctctgcggccactataccaggctgggaagggctctgaggaacccctcaggactgtgggaggtttgtcatcctcaccacgcaggtcttcctgtcaccactgacaccctaagcctttgtcagtttgttttttttttttttttgagacagagttttgctcttgttgcccagggtagagttcaatggtgagatctcagctcaccgcaacctccgcctcccaggttcaagtgattctcctggctcagccttccaagtagctgggattagaggtgcccaccaccacacctggctaatattttgtatttttggtagagacagggtttcactgtgttaaccaggatggtctcatctcctgacctcgtgatctgcccaccttggcctcccaaagtgctgggattacaggcgtgagccaccgcgcctggccgcctttgtcagtttcctctcttattctctcaacaaccttcctccctcctgggacccctacctttgcttctgacttcccttggaatcttgaggtcagcagttgtagtctgtcttcaccaccgtcctgccccttccctgtaggtgctccagtccatgtgggtctgactctcctgccgtctgagaggacaagggtccttccatcaccaacctccacctcctgcaccttcagttctcctcttttcattggccccttccctttgtttctttttaattttttttttttagagacaggatctagctctgttgccaggctggagtgcagtggtgcgatcacagctcactgcagcctgaactcctggcctcaagtgatcctcctgtctcagactcccaaagtgctgagattacaggcatgagccaccaagcccagtccctgcctgcttttttttttttttttttttgagacggagtcttgctccgtcacccaggctggagtgcagtggtgtgatctcggctcactgcaacctccgcctcccagatgcaagcgattctcccacctcagcctcccaagcaactgggattagtgtccaccaccacgcccggctaatttttatatttttagtagagatgaggtttcaccatgttggccaggctggtctcaaactcctggcctcaagtgatcaaccctcctcggcctccgaaagtgttgggattacaggcgtgagccactgcgcctggcccctgcctggttctgaaggcatctgaactggctttctctgcccagtggtaaagtgaggcatgggaggccctgggcagagcagggggtacccaggaaagcaggaagggagatgaagacccagaaagctgggtgcaggctgcatcctagaaaccagagaggaagaggtgggccacccgatagcaagatcagaatggaaagtccatagatggggacggctaggagatgaccaagtgtgggccatgttctctttgttgactgaggaaaggcggggaatggggcggctggtggaggagggagaggaggttatttaaggagagagatgaaaggagaaagcaagaaggtcgggggagggcagcatggcctggagctggcagaagatttacggtccagagggcaggtggaggccatcttcatgccctgtgtggcatgggaggccctgggtgaccctgtaaaggggacacgagatgtatgggctacttgcctactgtctgggtttccaggagggctggccagggagtgccctgaggctagagccaggcttggccctggcgttgctggtcacccctctcctttccaccttccccgctgcatgctgagtacacaggtgtggtccctgattccatccactgatcataggcacctgcacagcagcgaccctcatgtctgtctgcttccttttttttttttttctttgagacggagtcttactctgtcggccaggctggagtgcagtggcgggatcttagctcactgcaacctccgccccccaggttcaagtgattctgctgcctcagcctcccaagtagctggaattacaggtgcctgccacctcgcctggctaatttttgtatctttagtagagatggtgtttcactatcatggccaggctggtcttgaactcctgacctcctgatccacccacctcggcctcccaaagtgctgagattacaggcgtgagccattgtgcctggcctcttctttttttggagacatctcactctgttacccaggccggagtgcagtgacatgatcatagctcattgcagcctcaaactcccaggcttaagtgatcctcctgcctcagactcctgagtaactgggaccacaggtgcatgccaccatgcctggatatttttaaaaatttttgtagagatgagggtctcgctgtgtttcccaggctagtctggaactcttcggctcaagtgatcctcccacttcggcctcccaaagtgctgggattacaggcatgagccactgcacccagcccgcttccttatttccttcaggcctttgctcaagtatcacctggtgagtgaggcttctgtgaatacctggtttaaaaatcacacatccttggccgggcatagcagtacctgcctgtggacccagcttcttgggaggccgaggtgggaggattgcttgagcccaggatgtcaaggctgcagtgagctatgattacaccactggactccagcctgggcaacagagcgagactctcctaaaaaaaaaaaaaaaggccgggagcagtggctcacacctgtaatcccagcactttgggaggccaaagtgggtgaatcacctgaggtcaggaatccatgaccagcctggccaacatggtgaaaccctatctctactaaaaatacaaaaaattagccaggtgtggtggcacatgcctgtaatcccagctactcgggaggctgaggcaggagaatctcttgaacctgggtggtggaggttgcagtgagtcgagatcacgccactgcactccaacctgggcgacagagcgagactctatctaaaaaaaaaaaaaaaaaaaaaaaatcctgcatctaacgccgtagcactcgtctctgcctgacgttatttgactgctgttctctgccaccttccactcgatgcaagcttcttgaaggtggggacctgggtgcattgcagactgagtggtgcctgaccttaggggcatgtgactcatctgtgtgctgactgaccaagagaataagtggaccctggcatacagaggaggacagagtgggtacagaggaggacagagtgggtacagaggaggacagagtggctgcagaggggtggtgactgcccctgagtgcccatgtggtcttcattctttgtgtctgggtcacaaaacatgttgaagaacaggatttggttcacaaacagcatgaaggattttccctcagtccaagagcaggccatggatgaaagggcttaaagcaactgtcttggtataaagataccatgataggctgggtgtggtgactccacgcctgtaattgcagcacttggggaagcccaggcaggaggattgtttgagcccaccctgggcaactgggcaacacagcaataccctgtctctacaaaagaaaaaatcagccgtgcgtgatggcatgtgccagaagtcctagctacttgggaggctgaggctggaggatcgcttgagcctaggaggttgaggctgcagtgagctgtgattgcaccactgcactccagcctgtgggacagagcgagatcctgtctctctcccaaaaaaaacctaaaagtggttgggtgcagtggctcatgcctgtaatgccagcactttgggaggccaaggcaggaggatcgctttaacccaggagtttgaaaccagcctgggcaacatagtgagactctgtccctatttataaatcaaaaaccaaaagaatctatcagaacagttgtgatggacagctttgattagctccgactctgccctgggtgctcggccaagcccttgaatcctcagacagcagcagcggcaatccctgggtcgtggccaccctgatggtgcccatgttggtcatcagtaatcgagtgatgttggcctaggaaagttagcatcccccaggtcaagcgggtgggcggtgtcaagacggggagtccgtcggtgtggcataggctgtggcgctaacccctgctctctcctgcctctcctctcctaggcatttgcatcaagtgtgggcttggcatctacggagcccagcaggcgtgccaggcaatggggagtctttatcacactgactgcttcacctgcgactcgtgtggtaggtaacctcgtgccctgggtagctctgtgaaggggacctgccacatcatccccattcccctcaaactgccttgcccctgagtccaggcagatggaccacctggctctggcccaggctgggctgtggaggactctgtctggggaggaggcatggggcccctgaggagccttttgctggctgtaggacagggctgccccctggtcgtcagctgtggatcctctgtgccacgcagggcactaatgcgctcatgtcacccagctgcctgggagcagcgtcagaagcccatgaaggaccttctgcctgtctggacatacgactaatatttctttttcctgctatctatttttgttgttgttgttgagacagagtcttaatctgttgcccacgctggagtgcagtggaatgatctcggctcactgcagcctctgcctcccggtttcaagagattctcctgcctcagcctcccaagtagctgggattataggcacacgtgccaccacgctcggctaattttttttttttttttaggtagagatggggttttaccatgttggccaggctggtctcaaactcttgagctcaagtgatccgcctgcctcggcctctcaaagtgctgggagtacaggtgtgagccactgcgcctggcctacaatttatttttgatcataattttacacccaacataaactataagtgttatagtttaacctagacaaagttataaaaagaaaaaaggaactataatccaaccaccctaataaatatccactcttggtttgcccactgttcttccagaccttgccttaatcagacatcttttatgtatttgcacgttttttaattttaattttatattttttttttgagacagtctcgctctattgccagactggagtgtagtggtgtgatctcagctcactgcaacctccgtctccctggttcaagcgattcttctgcctcagcctcccgagtagctgggattacaggcacacgccaccactcccagctaatttttgtatttttttagtgagatgggatttcaccatgtggccaggatggtctcgatctcctgactttgtgatccgcctgccttggcctcccacagtgctgggattataggtgtgagtcaccttgcccggtaaaataccctagaaacttctatcttgtacccccacttgttttttgagacagagtctcgctctccccgaggctggagtgcagtggcgagatctcggctcactgccacctccgtgtcccagtttcaagtgattcgcctgcctcagcctcccgagtagctgggactataggcgcgcaacaccacgcccggctaattttttgtatttttagtagagatgtggtttcatagtgttagtcaggatggtctcgatctcctgacctcgtgatccatctgccttggcctcccaaagtgctgggattacaggcgtgagccaccgcgcctggccctatcttgccctttttcagttgatccctgtatgtcccccatcacatttgcccaactggtattctgatttctaccactgtagaaaagttttgtccattctagaacttaacataaatgcattcctatagtgcatactctttaatggctgatcttgtgttcaatgtctttttttttttttttttttttaagaagcagggtcttatgtcttcatccaggctgaagtgcagtggcccaatcacggctcactgcagccttgacttcctgggcccaagtgatcttcctgcctcagccccacaatgagtagtgggactacagacacgtaccaccacgactggctaatttttttttttttcctagagacagggtcttgctatgttgcccaggctggtcttgaactcctgggctcaagcgatgctcctgcctcagcctcccaggaggctgggaggctgaggcaggaggatcacttgagcttgggaggttgaggctgcagtgagccatgattgtgccattgcactccagcctaggtgacagagcgagaccctgtcttaaaaaaaaaaataccagcctggccaacatagtgaagccccatctctactaaaaatacaaaaattagccaggcacctgtagtcccagctacttgggagggtgaggcaggagaatcgcttgaacccgggagtcagaggttgcagtgagccaagatcacgccactgcactccagcctgggcgacacagtgatactctgtatcaaaaaaaaaaaaaaaaaaagattcattcccgaaaatttgctgtgaattcaactgatcttcaagtgaatgtgtttattaaccaacacatgtatttacatgagcaaaatatttattcatatatttgttttggcaacctttttaaataactctgtcgacaatgtgttctgtttaatttttttctgaaattttgttattataacaataacaacataatattaaagggaaatttagaaaaccacccataacccagtgtctcatctgttggaggagggtgctgagagctggaagcacggctccatccctggtccccagcgttccagggacccctctcaaccctcacccttgcagggagacgactccgtgggaaggcgttctacaacgtgggtgagaaagtgtactgccaggaggacttcctggtgagtccaagctgtgccctggcagtgccaggggtgggaggtggggcagggaccctcattctgactcgagtggagacctgaggccaggaggcaggtgctagctgggccgcgagtgcccctttgtcacacaatgtcctggatcctgtgtcccctcccagtactccgggttccagcagacggccgacaaatgcagcgtgtgtggacatctcatcatggaaatggtgagcccctgccccagcctcctggagcccctctgacgtgggtggagtctgaggactctaccgtctcccctgctccagacctgccaggggttcagggccagagcctctcccagggcggtgctgagcctcctgcccgcgctgacccctcagtgtgccccgcccacagatcctgcaggccctgggcaagtcctaccacccaggctgcttccggtgctccgtgtgcaatgagtgcctggacggggttcccttcaccgtggacgtggagaacaacatctactgcgtgcgagactatcacacgtgagttgctggtgctgtggagcaggcgggactcgggccgtcctccctggctcctctggaagcatttttttcctgctggactgactgccctttgttcttggccttttgccttccgcctccccttgtacacctgggcttggggcaggcatgtgtctctgcctgcatcccctctcctggtggtccggccaccagctgtcttttgcctcttctctccctatcgtggcctgcatgcttctctactcctggcacaggggaccctcctggctgcagtacccaccatctttccccctcctcccctccatcccctgccaggccaggcctctttcagctggggcaggggcttgggatctctgcagcccccttctcctgcctgtctgatccctgatctgtttcctcctaccgtgactccaggtttattcctgggagctctggttctgagcagggccttccgtgggattggagtcctgggcagaggtccctggtactcagggtgaagccaggtctcacagtggtcctagctagtggtgtcccagacctggacattaagaactcacaggaaacatgggggcagatggcagagcagaacctgaaggcatcctggaggaggtgattgggtggagatgaaatgagcagtcagataagaggccagggccgggcatggtggctcatgcctgtaatcccagcactttgggaggtcgaggtgggtggatcgcttgaacccaggaatttgagaccagcctgggcaacatagtgagaccccatttctattaaaaaaaaaaaaagaagaggccagtacaggaaggcatggcagaagctgttccctgtctgccccgaggtgtgcacacagggagagagggcctgatacttgggctacgtcagtgggttcctgtgggtgcccctgtgcttgtgcccttggcctctggtcactcagctgatcacttctggtttcctttatttctctagggtttttgcaccaaaatgcgcctcctgtgcccgtcctatcctccctgcacaggtaggagccactcacccagagatgatcaggtgcctggcccagccggctgctgtcctgtctagcctgggtctagcccaggtcttgggcgacagtgggagggatgagcaggtgcttctccgcagatctttcagggctgagggatgtgtgttgtgcttgtgtacgtggggtacagctgtcccctggcacaaggtcgagggaagtggtggcccctgccgctcagctgccccactgccagcctctgctccattctccattgatggaagggccgttccctgggtcttctcagctctgcaggctgaggtgggggtgctgggggagcagatgagagatggacgtggtctgtgcgggagccacccatgggtgctacagctctcctggcctggggtcttcccacagtgctggctctgtcccaggctggtgtgcctggcaaagcagaactggcagtgcccttttgagactccaaggaagtgaaaacaggccgggcacaggggcccacgcctgtaatcccagcactttgggaggccaaggtgggatgattgcttgaagccaggagtttgagaccagcctgggccgcctagtgagaccccatttctacaaaaaaaataaaaaattagctgggtgtggttgtgcatgcctgtagtcccagctacttgggaggctaaggcaggaggattgcttgagcccaggagtttgaggccgcagtgagctgtgattgcaccactgcactccagcatgggcaacagagagagaccctgtctcttaaaaaaaaaaaggatcagtgaggtgaaaataatgtccacatccattgacaaacacgtgacactcttgtgggcctttgtgcgtactgtgggctgtgatcgtggaggacgcctaaggcccgcatgtgtctgtgtgtgtgcacctgctggagcctgtcccgccccacagaagcagcgtggcagtgctccccggggcgggcgtgcacctccgccgggacaggagcgtggtgtgtgggagtgtacactcacgcagtttgcctccagtccccacatgctcatcgtgtgtgaactccttctcttcctccagggctgcgagacaaccatccgtgtggtgtccatggacagagactaccacgtggcatgttaccactgtgaggtgagcctgggcccacaggaggctggcagctggggcaggcctcctcccacagggctctcctctctgggtgttctgtgggcttaccttatcaaaattttagttttgccaggctcggtggttcatgcctgtaatcccagcactttgggaggctgaggagggtggatcacctgaggtcaggagttcgagaccagcctggccaacatggtgaaaccccgtctctactaaaaatacaaaaattagccaggcgtggtggcgggcacctgtagtcccagctactcaggaggctgaggtaggagaatcgcttgaacctgggaggcagaggttgcagtgagccgagattgtgccattgcactccagcctgggcaacaagagtgagactctgtctcaaaaaaaatttttttttaaaatttttatttattagagacaagatctcactcttgctcagactggagtgcagtggcacgattatagctcactggagcctcaacctcctggctcaagctatcttcttatctcaacctcctgagtagctatcaccacaggctcgcgccgccacattcagctaattttgttaattttagtagagatggggtttcatcatgttacccaggctggtcttgaactcctgggctcaagcgatccacctgccttggcctcccaaagtgctgggactgcaacgtgagtcaccgcgccagcctcacctattttatggcgtctaccccattctacctgtccttttcctgccccgcagagagtgcactgggggagggagtgaaggcaggtgctccctgagcagctggaggagtcagggttgggggcctgggttcacagaggtgggctgagttgagtgatggttaggccgtagaaaggactggatttggcaagtgtctggatgtggggggttgggggttgggggttgggaggtgttcatgagaaccccagcaaagagtgagggcagggggaagaggggatgggatgctctcatttttggtagctggagatgtccagtagacctgtaagtgggcgggggttcagcgaccctgccgacagctgtgggaatttggggtcactggcgtgtggcgctctcttctctgaatctttttttttgttgagatgagtctcactccgttgcccaggctgcagtgcagtggcactatctcagctcactgcaagctccgcctcctgggttcaagcaattctcctgcctcagcctcctgagtagctgggactacaggcacccaccaccacacccggctagtttttgtgtttttagtagtgacagggtttcaccatgttggctgggctggtctcaaactcctgacttcaagtgatccacccgccttggcctcccaaagtgctaggattacaggcttgagccaccacaccaggccttcttttctgaatcttggccctgggaattccagttgccttggcctccccagattctcaactcaaggagaccacggggctcccctgggcagctggagcagtctccaggcagtcagtcgggtgttgtggggtacacttctcagatttcccctctctgagagatgatgggcctccctggtctgttgtccggggtctgagagtcactgtcatctgtttagcctgttgctctcgttgttaaaggtgggaggggaaatccaatttctcttcctccgttctggcgggaagcaagggtcccatgatggacacagggacggcagctgaagccagggagcaagtgaggtcttccaggatgagttggaaaagaaggagtgggggtcaggatagctcagggagcactgtcatttaaggacacacacaggcgaagtggccacaaagggagactgaggaggcctgggcaggagaaccaggaggctgccggcgaccgcgccccagcaagagcagagcaagtggcggtggggaatctgcagtagcaatcagggatcccttgggtgacaaggtctcctgggtgcaggcgagtggccccatgggagcaccgattgtgtcagggtacccaggagggaggacaaggagcagggatggtctgcagaggggccagggctcccctccagccctaacaggacctccgcgtccctccacttgctgggccgtcctgtggactgtgcggtcccctgcagattgtccagtaccgagggcagcaaaaggttgacgctgagagtgagagcggggcaggcggctggtggtggtgctgtgctgccgcgaggctgttggatggggactgatacctccgggaccccgcactcctccctggcctggtgtgcagcggtcggtagcagggcccagccagtggcctgtggtgggacagacaggagaccagggaaaggagtgatgtggtgtcactgcagcagcccagctcccttccctgcgcagggcgggccaggtgttggtgtcaggggctctgggtaacgggtcaaagccgccagcattccagccccgagcccgcaacggtaaaaactgcgagatagggtacttgaagcccgccccctgcttcccaggtcctctcaccattgcctcttcagaccacccgggggtggcattcatcccttcaccctgctccagggacccctgtgtggtgggaactggtggacacttccttccgggccccccagcagcttggagcacagggccgctccctcctccacccacttgcttcactttgccctcggggctgccaggttgtggttgtcttcactttcgtttctccttgagtctcttctgcccaggcctgttctcttcccacctcctcatggaaggttctgctgtttgccgtcttctcttttctagtgatctgcaccccctggaagaggtggtctcctgttttgtctttaaaaaccatcacgtgaccgggcgcggtggctcacgcctgtaatcccagcactttgggaggccgaggcgggcggatcacgaggtcaggagatcgagaccatcctggctaacacggtgaaaccccgtctctgctaaagatacaaaaaattagctgggcgtggtggcgggcgcctgtagtcccagctactcgggaggctgaggcaggagaatggcgtgaacccgggaggcggagcttgcagtgagctgagatcatgccactgcactccagtctgggcgagactctgtctcaaaaaaaacaaaaacaaaaaaccccatcacgtttggctgggtgcggtggctcacgcctacaatcccagcactttgggaggccgaggtgggaggatggttgtgaagccaggggttcaagatcagcctgatcagcatagcaagacgccatgtctacaaaatacaaggggaaaaaaattagccgggcatggtggcacatgtctgtagtcccagctgcttgggaggctgaggtgggaggactgcttgagcccaggagtttgaggctgcagtgagctgagatcgcaccactgcattccagcctgggcgacagagtgagaccctgtctaataaacaaaaaacaggccaggcacggtggctcatgcctgtaatcccagcattttgggaggccgaggtgaaggatcacttgaggtcaggagttctagaccagcctgagcaacatgaaaccccatcactacaaaaaataaacaaaattcacagggcgtggcagggtgcgccagtggtcccagctactcaggaggctgaggtgggaggatcacttgagccctggaggtcgaggctgcagtgaactgggatccagacactgcattccagcctgggtgacagtgagagaccctgtctcaaacaacaacaaacgaataaacaaaaaacacccaaaccatcaggtttttatgctgacacccatgttgactgctcagccctctccccgcagtctgacttatatccagtgacttcctcttggatacctgagaggcagctccagtctccagtgctccacgccgggcttcccataccccctctggcagaggaagagtctttttttttttttttgagatggagtttcgctgttgtcacccaggctggaatgcaatggcaggctctctgctctctgcaacctctgcctcccgggtttaagtgattctccagtctcagcctcccaaggagctgggattacaggcatgtgccactatgcccggctaattttgtatttttagtagagacagggtttcaccatgttggctgggctggtctcgaactcctgaccgaagcgatgatccagccgcctcagcctcccaaagtgctgggattacaggtgtgagcccctgcgcccggcggaagagtcttcatgttgttttgcggcaccctgcagatctgcccctcccctccgtccctcccccgtcccgtgacctctgatgtgcgcttgtctgctgactctggggctgggggctgtgttcttccctaggactgcgggctgcagctgagcggggaggagggacgccgttgctatcccctggcgggccacctactgtgtcgtcgttgccacctgcggcgcctccaacctgggcctcttccctcacccactgtgcacgtcactgagctctgagcaggggaaaacccgtccctgggccggggtgggtgtgggtgtggagggagggcccgcgtgggtggccctggtcagcgtcaggggagctccctccaatcagtttcccaccgagctgctgtctgcaggggccggacccccgcgtggaagcttctatttattcaccgtctgtgcctgctcaagtcacttccctgcgggccctgcctcccacccaccccatcaccagctttccacttggaggccccctgtgccctgcagcctcagggtaggccgtgggtcaccaggctggagagggcccctgccttggccaggggtgcgaggtgacccggctgcattgctgggtgggagctgctgtctgttgttcaggggcctggcccccgccctcccccccgaccccgacctcgcaaagcgcactcccgggcagggtgtggtctggaaggcggggctggcggggacatgggtgttcctgcatctcctagcgcagttcctgctggtgggtggaagggtgcctggtttaggcggggtcccaggagggggtgaggggtgacacccttggggagggggcctgcaaagggcactgcctgtggccacgtggtgtctgtgggaattggtcctggggactttgatgggtgtttgcggccccagttgccgccctgctccctcttccagggctcctggcttgggccccccgacccccctgctcagctcgggaaaatccccgtgcggctccagccccgggtcacgctcaggagcgatgagaggggcgccctggccacgcttcaggaaagcctgtgtctgcgcgcggggcaaggggctccacgacaaaaggacaagatttgacttaaattaagtttttcccttgaggatattttcattttctttaaaagaatataattttcttctaagatcttggaccagccttgttatttttaaagcaaatgccggcaaactcacaagtgtctagtttgtctgttacggagctggttttcaggtggtaagaaccttgtggtttcaggacttttgtcctgaaattcctctaaaacttcgccacgcgtgtccacctttcagactttagggtagtgtggggttccgtgtgtgtccgggtgttaagggcggtcgccccatgaaatgcagtgtggaggtccctccgtgctccccgggacacactgacgggaatgtggggtctggacatgggaggccctggtcctgatgcggaatccccaggggttcaggggacatctggactgaagtcactcgcccctgggagagcctggacccacctcttggctgctgctctccccttcctcccccaccgtcaggtgtgagttctgtgaatcactcgcggggctgggctaggctccgggaaccagcagggctgtccaggccgagcccaagggaacaaacaccaggaggcgcccgcagggaagtggcggcttcggagtccagcagggccgaggcatggcgcgggcgccacctggtgggctgagccggcaagtacaggggtggtcagggagccttagccagggacttacacagcgtggagagcgctgcatcttagagtggggccttcagcaggaccaggggccacttcttggaggaggtgatcccactggggccagagagtaaagtccaggcgtggaggctccggtgctggctctctcctgctagctgagctgctttttcttttcttttctttttttttttttgagacggagtgtcattgtgtcacccaggctggagtgcagtggcacaatcttggctcactgcagcctccgcctcccgggttcaagcaattctcctgctttagtctcccgagtagctgggactacaggcgcacgccaccacgcccggctaattttgtatttttagtagagatggggtttcaccatgttggtcaggctggtctccaactgctgacctcaggggcgatccacccacctcagcctcccaaagtgctgggattacaggtgtgtaccactgtgcccggctttttttttttttttttttgagacagggtctcgttctgtcgcccaggctggagtgcgttggcacaatctgggcctactgcaacctctgcctccagggttcaagtaattctcatgcctcagcctccccagtagctgagactacaggtgtgccccatgacgcccagctattttttttttttttttttttaaagacagagtctagctctgtcgcccaggctggagtgcagtggcgtgatctgggctgactgcaacctctgcctcccacgttcaagcattctgcctcagccttccaagtgctgggattacaagtgtgcgccaccaggcctggctaatttttgtatttttagtagagtcggggtttcaccatgttggccagactggtctggaactcctggcctcaagcgatccatccgccttgaccttccaaagttctgggattacaggcgtgagccactgtgcctggccttactttttgtatttttagttgagagggggtttcagcatgttggccaggttggtgtcaaactcctgacctcaagcgagcccaccttggcctcccagagtgttgggattacaggcttgagccaccgtgcctggcctgggctcctttgccttctaactggtcagttgcaaagctgtcctctgaactgtcctctctgcttcctccctcaaacctgctttgagccgggtttctccttgttgccaacccggtccttctcctccccttcctttgcatgtgccatggtgggccctgtgcttatatccatggggttgcttcactgaaccctgctccatcccggtcaccatgcacgctcctgccagctggcctgagtcatcacagcttggagtccccccaaccccacccaagtaacacactttgtcaaaggtcgcagtcaagggactgcataggcccttggggcagtggcctcaccaggccacactctgccctttctttctgggcccctgggccccgcattgccttctgtcagggctggtggccactgctccacctcctcccccggagctgtgcatggcagttccctccgtgggagccactctcccggggtttcttcctctatgaagaaaccttggcctctatgaagtcaggccccagttgtgacacctcacttgacacccagaagtcttggcctctgctctccaagctcatttgccaacagcagtatctccatttcatgcccaggggtgacactgaccccatgattatagagatggaggatgctgtgtgagaactgggctgagccatgccagtggcctgtgaccctccagccctggatgccaccccccacctgcccaaggggacccccactgatgtggtctctgctgacacctgtgcctgtgcctggggtccctgtcatccttccctggtctgagtggcaagtctcctgccatccctgtccccgctatgcggtgagctcttcagcttgggcccgcctggtggctcacgctactctccaccgtgcctggattagggcgagtgctgaggctggagctgaccctgccctggccttcagggtcttggcttagttccacctgcactggtccaagtccagcctggttgcctagtgaaggatccacagtgggtacataaagggccaagcgctgtccacgtggacacatcctatgtgggcgtgagtgctccctgcaatccccagacaagcctgcctctcagcggggctcagctcagagacatagaccctggagggctgagtctgcctgtgtgcgtgtgtgtgtgcatgtgtgtgtgtgtgagagagagacagggatggggggagagtgtgtgtatcaatgagagagacggagaaagtcgtgtgtgaaagggattgaatatttcagaaaatgaatgagagagattgggagagatggtgggaggtggagtgggagagagacctgttgtttaagagggagactgagtgactccgagaatgagggggaaagatacggagacaggataagctgcagagagagagggagagagggattgaactggagcgagaccaacagagccctgacgctgggatttgggaggatttggtgggttctcagtgaccccactgaggcctgacccaccagtggaaaaggctcacctcctgtaagtgaccacactgtggggtgtaattgtgtgtttgtttgtgtgtgtgtgtgtgtgtctgtgtgtgtgttggcgtcgccctgatggcctcttggagggtcctggggtgggtgggtcttgggcatggggtgccctctgccctcattctttcttcatccgggctccctgcccctgttggggtgggaagcacagatgtcagcttgctgagctgcaggtaccatgacaatcccaagtggaactgctcttggggggctgtgtggggaggggccactgggcaggatttatgagacctgggcagaggtgtggggagcagtgtgggccagagggtgactgggggttggggtgagttgggtagggtgcagctgtgctcatccctcccacccagccccaccctgaggctggtctctagctcgtgagcagaggccgagagaaggcccttccccatcacggggtcctgtctcgtccggtctggcagccctcatctggccaggaggccagcaaggacttccggtgccacactcgggaggggtgagggctttgctggctgcagggttaggagtaggcgcagcctgtggggcccaggagaaccttggggtggggatcaagaacaggtctgggagaggggggagcatcagggccacctgcagcctccacccagcccagctctggaggctttgcccccaccccgcccccatggtaggcgtgttccctagaggctggtggggacctgggagaggggcatgtgcacacatttcatggggatgatgggggactctgggagccagcctgggtgggggctcagaggtgggaggggccctgaggcctgaggtggtggaaggagctcacctatctcaggcccaggcccttgccaggttcctagtccctggccggataccccagggtggcctgggatcctggagagtgctcaggaaactcaggaggagtgtggacgcggctcctctccttccacccacttccctggccctgagggcattgctgggccaccatcccagacctggggcatgtgtcacagggctgccaggagggcatagggcccaaggattccccagggatgccagcccccctgtgggccctcaggactggtagccctgggccccctggcgctttgtagggaggtgctcagcagtgatggttgtgtgcctgtcacacccacccacctgtgcctccccccacctgccacgcccattgtcctacacccagcgcacactcctctccacgctgcgcacgtgaacccgcccgggtcacacacctgccctgccatggtgacaggactgtgtgggatctctgcctccctgcctgaagttcctgccattgggacctgtcacaggcacacaggacacagctggctcaccctcttctctgacagcacctgggccatccctgatagtgatcagccctgctgaggaagggttagggtgggctgcaggctggaggccagggagaggccctggaccgggcctggcatttactcaccctcctcccatcccacactgtcccggagcctccatctccacctgagccagctgggttgatgcggatttccaggcatcctcagcgggacccatggcctggggtcaccaccttcctgagctgcgtggatctcagccaggacttctcgtccctgagaacagattggggctgggagtcccagcccgtccctggaccagccctgccatcagcttgcccagcctagttccctttctcttctgcgctctgaatgtgcactccgcgtgttcagatgctcatggtttctgatgagaagttggctgtgtctctcacggagcctctctcggaggtgatgagtgacttttctcttgctgccgtcaagattcctggctgtggattggatggatgggaagctctgtccctgaacagcccttgtgactatggggctgtccttccacagtgtgcactgagggtgcaggccaaaccttttaaagaataaacagaaagaaatcggctctttcacttcttgcaagttggtgaaaacagactcttccagggaattttaactttttatcatcctatttactctggaaagccttgtctcgtgttttagagcttgtagggtttaataaaactagttaacagccaggcacggtggttcacgcctgtaatcccagcactttgggaggccgtggcggataggtcacttgaggtcaggagttcgagacaatcctggccaacatggcgaaaccccgtctctactaaaattacaaaaactagccaggtgtggtggtgggcacctgtagtcccagctactggggaggaggctgaggcacgagaatcgcttgaactggggagactgaggttgcagtgagccgagttcacaccactgcactccagcctgggtgacagagctagacgctatctcaaaaataaataaataaataaataaataaataaataaatgaatataaataaaactggttaaaaattgagtctccctgaagtaggtgctctttcccgtgaaaactacttttttggtttggtttgaaggtaagaaagagcgggagaaactttgctcttttcatttaataattgtgttcagcctggccgggcgcggtggctcacgcctgtaatcccagcactttgggaggccgaggtgggcggatcacctgaggtcgggagtttgagaccaacctgaccaatatggagaaaccctgtctctactaaaaatacaaaatttttagccgggcatggtggcgcatgcctgtaatcccagctactcgggaggctgaggcagaagaagcgcttgaacccgggaggcggaggttgcagtcagccgagatcgtgccattgcactccagcctgggcaacaagagtgaactccgtctcaaaaaaaaaaaaaaaaaaaaaaattgtattcggcctatgatgaaatattttattattagatagcagtgtcactaataagttttaagttgtccagagttaattgtgaatatcagaacaggattcttataacaaaagcagttgtcttaagatgaatggctcatatttgggtgcagtatttgatgcccaaaagaacaaacataaaccaaaaaaaaaaaaaaaaaaattccagactgtcccctttggatgccagttgaatctgtgtcttgtgccccctgagggtctgcccggtcacatccccttgtcttctctagggttcacggggatccttctcatcctcttctaggtaccaggttccattagttttgtctgtcagtcttgtcaccagggagctggagacctggaggggagccctgatgtctgggacagtgcttgtcagtggatgggcttttgcatagggggatggggtagggagtgagtcattgcattatagacttggactaggtggatgctatttttcatggtggtggtgatgggagaagctgttgggttatttcacagaggaagcccgagctccctgctgaagatgataaatgatgcacagatttcaatccatcctacggcttcagcctccagtcctggtcccacacatctcctggagcagagcctgattcccagcctctgtagctggttgaggagcaaataggtttccctgtcctgactccaccttggagcaccttcccttgagacccaccaggctctctttcagtcacagcatcttcctcctgctccatgtggttgaaatctcaggtcctctaaggatccctcctcattctctgttagtgtgaggtgggacttttttttttgttttgagatggagtcttgctctgtcgcccaggctggagttcagtggcaggatttcagctcagtacagcctcggcctcccgggttcaagtgactctccggcctcagcctcccaagtagctgggattacaggcacctgccatcactcccagctaattttttatatttttagtgaatacagggtttcatcatgttggccaggctggtctctaactcctgaccttaagtgatctacccgcctcagcctcctaaagtgctaggattataggtgtgagccactgcacctggcctgtgaggtgggaagtttcaatactcccttagccttggtttggtcaccagaaggaggggacatgagtgaaggtcccagtccaccctatgcaagcagaagcctctttggttttagttttaaaggtgcattgacccatgtacctttgcatggacatgttcttatttggggttacctttgtgttgactttgtgtggccaggaccctggagatgaggccaggatggccgactccaaccccttagctgcttccttgccctgtatggagcagctcagcctgggatgcaggagcagctgtgtccctccgctcccgccaggcctctccccctgccttctgggactggaagttcctaggagtccggaagtgctgagctgcaggaggcttctcatggccccaggacacacccatcaccccatctatattgagatgttatctagagagacgcctgtagtaaaatccgctctgtgacggtggtgtataaacattttctgtgcaaggaccttgccctccttttcaaaaaagtaagtatgactcccacatgaaaattttcttctacaacacgacatacgttcattgtggtacatttaggaaatttaaatgatttatttcttataaaacatcatctgtttttctactggacctggcttttataaatcatgcggtgataaataatatggcagttagagctgggtgcacttggctcctgcctgtggtcccagctggctgggaggcagaggcaggaggattgcttgaggccaggattccaggctgcagggagctatgactgccagtgcactccagccagggtaacacagcgagaccctgtgttagcctgttttcacgctgctgataaagacatccccaagactgggaagaaaaagaggtttaattggatttacagttccacatggctggggaggcctcagcctcccacatggctggggaggcctcccaccaaaaggcactttcatggtggcggcaagagaaaaatgacagagatgcaaaagcagaaacccccgataaaaccatcagatcttgtgagacttattcactaccatgagaacagtgtgggggaaactgcccccatgattcagattctctcccactgggtccctcccacaaaatgtgggaattaagggagtacagttcaagatgagatttgggtggagacacagagccaaacgatatcattctgcccctggccccttcaaatctcatgtcctcacatttcaaaaccaatcatgacttcccaacagtcccccaaattcttaactcatttcagcattaacccaaatccagagtccaaagtctaatctgagacaaggcaaggcccttccacctatgagcctgtaaaatcaaaagcaagttagttacttcctagatacaatgggggtacaggtattgggtgaatacggccattccaaatgggagaaattggccaaaacaaaggggttacaggacccatgcaagtccaaaatccagcggggcagtcaaattttgaagctccaaagtgatttcctttgactccatgtctcatatccaagtcacagtgatgcaagaggtgtgttcccatagtcgtaggcagctccacccctgtggctttgcagggcatagctcccctgctggcttctttcatgggctggcattgagtgtctgcggcttttccaggcaccttgtacaagctgtcagtgtatctaccattctgatgtttggaggatggtggccttcttcttacagctctactaggcagtaccccagtagggatactgtgtttgggctctgaccccacatttcccttctgcactgccctagcagaggttctccaagagggcccctcccctgcagcaaacttttgcctgggcatccaggcattttcatacatcttctgaaatctagatggaggttcccaaacctcaattcttgacttctgtacacccgcaggctcaacaccacatggtagctgccaaggttggggtttgcactctctgaaaccatgggctgagctgtaccttggccccttttagcaatggctggagtggctgggacacaaggcagcaagtcctaggctgcacacaacatggggactttgggtccagcccacaaaaccattttttgctcctaggcttctgggtctgtgatgggaagaccaatgacatgccctggagacattttccccattgtcttggggttaaacattcccctccttgttacttatgcaaatttctgcagccagcttgaatttcttctaaaaaaatgggtgtttctttactgcatcgtcaggctgcaaattttccaattttttatgctctgtttcccttttaaaatggaatgtttttaaacccaagtcacctcttgaacgcttttctgcttagaaatttcttctgccagataccctaaattatctctctcaagttcaaagttccacaaatctctagggcaggggcaaaatgccgccaatctctttgcttaaacataacaagaatcacctttgctccagttcccaacaagttcctcatctccatctgagaccacatcagcctggaccttagtattcatatcactatcagcatttttatcaaatattaaacaaatttctaggaggttccaaactttcccacattttcctatattcttctgagccctccaaactgttccaacctctgcctgttacccagttccaaagttgcttccacattttcgggtatgttttcagcaacaccccactcccagtaccaatttactgtattagtttgttttcatgctgctgataaagacatacctgtgactgggaagaaaaagaggtttaatgggacttgtagctccacatggctgggaggcctcagaatcatggcctgaggcaaaagttatgtggtagcggcaagagaaaatgaagggtgcaaaagcggaaaccctcgataaaaccatgagatctcgtgagacatattcactaccatgagaacaatatgggggaaactgcccccatgattcaaaatatttcccattgggtccctcccacaacacgtgagaattatgggagtacaattcaagatgagatttcggtggggacacagagccaaaccgtatcagaccccgtctctacaaaaacaaaaacaaaataaaaaaaagtagctacgtgtttgggcctggctttcattatttaccaaggatcaagacctgaacatgaaaatggcaggccaagggttcctgcctttggatgcacatggccaccttgcccactagaacatctgtgccaagcagtgttcccatcaatcataggaaaataccatttcccgcatccttaccaaccctaggtattgccaataagaaaacaaagtctgtatcaatttgatgaaaataatttgaatgtgtgcatttgatgagctgtgagaatgagaatcttttgcatgcattggccatgggcttcccttttgtgagttgcctgtgaatgtccttttcccagtttactagtttgggattgaatattcttacacatttatttggtgaagaacttttatttcaaattatgaaagaaaaaaatacttgctagaattctgatttgaagtgctttcaaattctgtgttaatttggagctgacaccctttaatattgagtcctggctttgagggtctggtgcgtttcctccattcactgaagttttattttacatctctcagtaaagctttatggattagggtcttcagaagccttacttgtttttctggctctattttcttgtccagaaactccaccactgtgctaaagagacagtggtggaggtgctgggcgtgctgcttttctcctggctctaatgggaaggccaagaggcaggtcagggtcagactccaccttgagtctggcattggctgttggcatcatgaggaccccacgtattgtactttgataaagttaataaatggaattctcctttacctcaagaatgccttatgtgttgtgtgtagcatgcaccttcttgtggaaacagcttcacatgtgagagccctagcacgcaggtgatttcaggaccacccccagcccatcccgtggcgcaggatccaggcagctgcagtgcaggcgaggacccctggctgggcgcggtcctgtgcgggtccctgtgcggtgcaggcgtccatgcactctgagactctcagcctgctctgtggcctgtcacgttgtgtgtggggcaagacgcttgggtgcacatatgtgagaatgggactgtgtgtgtgagtggaatgcgctgttgggagcgtgtggggtgtgtgtgtgtggcacctgcggttggggtgtgtgactgtgtagggtggggatctgtgattatatgaatatgagggtgtgattgttgctgggactgggcacgtggctgcctctgtctctgcctctgtgtctgatagagacaggaagagatgggggaggcctggtgtgggggccctgcgggacagggccaggggacccttcctcactttacgccatctgaggaccctccccaaggggaaaagccagctacagtggaaaagcactggcagagtgggcttcgtcctggggagagaggctgggagactgcagctgaaagatgtgggctccaggagggcctcagggggctgagcatcagggtcagggaatagagggcctgggagcagagggcggccctccctccatcttccttccttctctggacttcagagcactgtgtccccttcccacttgcacagctgcaggtggagccagctggggggctttctagagggagtggggtcctctgagggccaagagggccaggtccctgaggacctgaggcccctctgggcctcccagggctgggcctgtggctctgatctgctttgtcctgggagggacatgctcagtggtggggtttgtgtagctgtcactcactcacctgcctgtgcccagccactcacctctcactcccatcagccccacccaatacacacgtggttcctcaactaccatgaggggaagttcctgcctgtgtcacacacatccatcccacccaccacactgcaggttacaggactgccccacaagtgccaccatgcccgcatgaggttacctggcacacaggtatcctcacctgcatgacatgaccagatcgtgcactttctatgccagggccagggccagggcaagcttgcaccttcagccttggggacactgggggtggtggtggctggaggccagggaagtcaccaggctggagacatcatctacctccaggagagggttgatatcagacatctcccgtgcaccactttaagccacctcagcctcacctgggaatctggctgcaggtgagtcccagcagtggaccagcatgggaccagcagttccatgaagctttagaccatctctaggcttaggaaggggctcccttgtcatcacttggtccgggctgcacgtcttgtgaccaagggctctggacggcagatgcagccagccagagcgtggggctgaggggcctgggcacaggagggatgtgagggcttccctgcacccccatggccaccatttcagagggaggacagcaattgtttgggtttgtcctgtgagtggtggcagagagcagggccctgggcaggtccagggccagacaggaatcctgtgctgcagcctcggggccacaagggcacagcatggggccggtgtgggggtgttccctgtgccaaacacattggcaggaggtgccctggggtcagtgggtatgtcagagctgtcaggcctctgagcccaagctaagccatcatatcccctgtgacctgcatgtatacatccagatggcctgaagtaactgaagaatcacaaaagaagtgaaaatggcttgttcctgccttaactgatggcattaccttgtgaaatttcttctcctggctcatcctggctcaaaagctcccccactgagcaccttgtgacccccacccctgccagccagaggacaacctcctttgactgtaattttccactacctacccaagtcctataaaacagccccacccctatctcccttcgctgactctgttttcggactcagcccgcctgcacccaggtgaaataaacagccttgttgctcacacaaagcctgtttggtggtctcttcacacgtacgcgcgtgaaatttggtgccgtgacttggatggggggacctcccttgggagatcaatcccctgtcctcctgctctttgctccatgagaaaaagatccacgtacaatctctggtcctcagaccaaccagcccaaggaacatctcaccaattttaaattgggtaggtggcctctctttactctcttctccaacttctctcactatccctccacctctttctcctttcagtcttggcgccacacttcaatctctcccttctcttaatttcagttccttttctgatagagacagagaagacgcgtattatccgtgagcccaaaactctggtgccagtcaaggactcgggaaaacagccttcccttggtgtttaatcactgtgaggacacctgcttgattattcacccacgtttcagaggtgtctgatcactgcggggacgcctgccttgatccttcacccttagtggcaagcaccactttttggggggcaagcaaccccccaccccttctctccgtgtctctaccctctcttttctctccactttcttgtggggaaacactccccactccttcttcactttcctctgggtggcaagcatcccccaccccttctctccctgtctctaccctctcttttctctccactttccagggggacaagcacccccctccccttctctccgtgtctctaccctctcttttctctggacttgcctccttccctataggcaaacttccaccctccattcctccttcttcttccttagcctgtgttctcaagaacttaaaacctcttcaactcacacctgacctaaagcctaaatgccttattttcttctgcaatgccacttaacctcaatacaaacttgacaatggttccaaatagccagaaaatggcactttcgagttctccatcctacaagatctagataattcttgtcataatatgggcaaatggtctgaggtgcttgatgtccaggcattcttttacacactggtccctccctagtctctgttcccaatgcaactcatcccaaatcttccttcttcccccccccccccccgcctgtcccctcagtcccaaccgcaagtgttgctgcgtctttccaatcgttcttctttacagacccatctgacatctcccctcctccccaggctgctcctcgccaggccaagccaggtcccaattcttcctcagcctctgctcccccaccctataatcctttcatcacctcccttcttcacacctggtccggcttacagtttcattccacgactagcccttccccacctgcccaacaatttcgtcttaaagaggtagctggagctaaaggcatagtcaaggttaacgctcctttttctttatccgacctctcccaaatcagttagcgtttaggctctttttcctcaaatataaaaacccagcccagttcatggcttgtctggcagcaaccctgagacactttacagccctagatcctaaaaggtcaaaaagctgtcttattctcaatatacattttattacctaatctgctcccaacattaaataaaactccaaaaattaaactccagccctcaaaccccacaacaggacttaattaaccccaccttcaagatgtacagtaatagactagaggcagccaagtagcaacatatttctgagttgcaattccttgcctccactgtgagagaaaccccaggcacatctccagcacacaagaactccaaacacctgaaccacagtggccaggcgttccttcaggactgcctgccccaggagcttgcttcaagtgctggaaatctggccactaggccaaggaatgcctgcagcctgggattcctcctaagccatgtcccatctgtgtgggaccccactggaaatcggactgtccaacccggcagccactctcagagcccctggaactctggcccaaggctctctgacggactccttcccagatcttctcggcttagtggctgaagactgatgcagcctgatcaccttggaagccccctggacgccgagcttctggtgactctcacagtggagggtaagtccgtccccttcttaatcaatacagaggctaccccctccacattaccttcttttcaagggcctgtttcctttgcctccataactgttgtgggtattgacagccaggattctagaccccttaaatctcccccactctggtgccaacttggacaatactcttttatgcacttctttttagttatccccacctgcctagttcccttattaggtctaggcattttaactaaatcatctgcttccctgactattcctaggctacagccacacctcattgctgcccttttccccagttcaaagcctccttcacatcttccccttgtatctccgcaccttaatccacaagtataggacacctctactgcctccttggtgactgatcatgcaccccttaccatcccattaaaacctaatcacccttaccccactcaatgccaatatcccatcccacagcatgctttgaaaggattaaacctgttatcactcacctgctacagcatagccttttaaagcttataaactctccttacaattcccccattttacctgtccaaaaactggaaaagccttacaggttagttcaggatctgcaccttattaaccaaattgtcttgcctatccaccccatggtgccaaagccatatactcttctattctcaatacctccctccccaacccctccataacccattattctgttccggatctcaaacacgctttctttactattcctttgcacacttcatcccagcctctctttgctttcacttggactgaccctgacaaccatcagcctcagcaaattacctgggctgtactactgcaagccttcacagacagcccccattacttcagtcaagcccaaatttcatcctcatctgtaacctatctcagcataattctcataaaaacacacatgctctccctgctgatcatgtctggctaatctcccaaaccccaatcccttctacaaaacaacaactcctttccttcctaggcatggttaggtacttccgcctttggatacctagttttgccatcctcacaaaagcaaacctagctgaccccacagatcctaacacctctcagcaagccagactcattgccttaactcaggccctcactcttgcaaagagactttgcatcagtatttatactgactgtcaatatgccttccatatcctgcaccaccatgctcctgctgcagttaactagcccaacctattcctttaattcagcccatccctttgtttcccataaaggatacttttagttaatttaatatctatagaaacaatgctaatgactcatttgctgttaatcaatacgtgggtaaatctctgtttggggctctcagctctgaaggctgtgagacccctgatttcccacgtcacacctctgtatttctgtgcgtgtgtctttaactcctctagcaccactgggttagggtctccccgactgagctggtctcggcattgttcctagagtgtctttgctggttttggtcctctgcattcccatataagtttagaaacaactttttgatttcaacttggagagaattgaagttttgatagtattgagtattcctctccataacgctggtacatggtgccatttattttggtcttccctattttctctctataactttttacatatatatttctatggtgctcttatacatgtagtaattgatttattccaaggcatcttttatttttaatgccattgtaaatgttacattctttaaagtgtaagtttataaatgtttgtgctgccatatagaaggttttaattattttatattgttttgtatttaacattcaaaaactctttagtctctgtagattctctaagactatttatataaatatatctaatgcatatttgtttcttcctcttcaatcttcatatattttactggtcttgctttattgcatttgtagaatctctagcacaatgttggatagcaatggtgaaggaaggcatttttattctaaactcaagaggaactttttttgtttttgctcttgatagcattgtgttttatataaatttttaaatttcacataattttaggcttataagaaagctgtgcaacattttataagtatttctggatacccttcatccagattcaaaaggatagcttttgatatttcaccattaaatagaaagtttaatataagatttttttgttagatgctctttattagattaaagatatattattctaggccaggcatggtgactcacgcctgtaatcccagcacttggggaggccaaggcgggcggatcacgaggtcaggagatcgagaccatcctggctaacacggtgaaaccccgtctctactaaaaatacaaaaaattagccgggcatggtggcaggtgcctgaagtcccagctactcgggaggctgaggcaggagaatggtgtgaactcaagaggtggagcttgcagtgagccgagattgcgccactgctctccagcctgggtgacagagcaagactgagtctcaaaaaaaaaaaaaaaagaaaaaaagatatattattctatttctatttttaagagaattaaattttttttttttttttttttttgagacagggtctggctttgtcacctgggctggagtgcagtggtgcagtcttggctcactgcagcctcaacctccagcacttaagtgatcctcccaccttagcctcctgagtagccgggactacaggtgggcaccaccacacctagctaattttagtaatttttgtagaggcagggtttctccatgttgcccaatgtagtctcaaacttctggctcaagctatctgcccacccagcctcccaaagtgctgggactgtaggtgtgagccactgacccctgtgtaaaataattttttaaatccagaaaagatgaattttataacacatctcacttgcatttagtgaaatgtccatgcaatttttttcccttagttctgtgaatgtgttaaattacatcaaataattttgtaatttgaaacctaccttgcgtttctggtgtaaattctccttaatcagcttatagtattctttatatgtaatttcattcactttgccaatatcttgcatggaacattttgtctgtgtcttcgagtggttggattttggtgtcaggatactagctcattatgaattgggggatgtagaggtgatttctatttattccaacagagctagtcttcttcttttcatagcctgctttgtaccctacgacctggcattttctggatgacatcattgggctatgttgacctttggttttctgtgggttgacacattggagatagggcaggacatgggagggaagacaagagtgagatggggggattcactcccagctgcccttctttggggctacaagttggccatggctgtgttcctctcctgtggccaaaggtcctgtgagctcaccctcccacaagtacaagtctcactggatcatagcaacagctcctttccttgcctcccattagatatttcgctcttgcttgccttgggcattttgttattggtttcccttaactttcctcacagcagagccataagcctgtgaacccaaaagtatctgagacaggtctcaatcaatttagaaagtttattttgccaaggctagggatgtgtctatgacacagcttcaggaggtcctgaggacacgtgcacaaggtggtcagagtacagcttgcttttatacattttagggagatataatacatcaatcaatgcatgtaagatttacattgctttgatctggaagagcagaatgacttgaagtggggttgggggggcttccagttcttaggtgggtttaaaatttttctgattggcagtgggttcaaagagtgattgtcaatagaaaagaatgtctgggttgtgataagggatggtggagaccaaggttttatcatgcagatgaagtgtccaggtagcaggcttcagaaataatagattgtaaatgtttcttatcagacttaaggtctgtgttgatgttaaatcctggttggtttttcctgaattccaaaagggagatgggtataatgaggcaggtttgacccctccttccattatgacctgaactagttttttaggttagctttggaatgcccttggccaagaggaggggtccgttcagatggttaggggccttagaattttattttttgtttatagccattcattaaactcttgtcacgtatcctgtgtgagtgtgccgtttccttcctgcagggacactgactgatatagggaatgcaccctgatagtttatgctttggaagaatttgtataagattggagtggtgtaagtgcctgacaggttcttcctgcctgctgcacaagcaaatcaattcatggagaccatggcattgcagtgaagaaagagtttaattgatgcgaggctggtcaaaccacaccagtgacagagttatcatcaaggcaatctcatcgaaggctcagaggccaggtgtttttcaaatatgcttggtgggcagggagctcgggtatgaggagtgctgagtggttgggttggagatgaaatcataggaagtgaagctgtctttttgcatggagttacttctggaggccacaggaacaactggtgggtccaggagaagccattggtgttagacattaaaaaaaaaaaacacctaaaaaggcatctcaaaaggccaatcacaggttctaccatagtgatggtatctgcaggagtaattggggaagttgcatatctgtgaattccagaataattgctggcaattatttaatatattacatttaatttttttattttaacagctttgttaaagtataattgacatataacaagtatgtatatctaaagtatataatttgtaacttttgtttatgtctgtatcttggccaaattaaggctcctctatcctcctagcctgatggtctctcattagctttacaaagacagttgagttttggggaagggctattatgatttaaagtatgaactaaatgtttcttttcaatgttcctcttttcactaatctattaagtcaattctaattatattttaaaatcttgtatatgttcattaaattaaatttttttgtcataatactttcattgaattataagtgacatataacaagcgtgtatatctaaagtatataatttgtaacttttgacagtggtaaaaaccagaacaaccaccataatgatcaaaataatgaacacatccctcacctccaaatgttttgttgtgcctgtgtgtaacaccctctcttgtatctccttaaccccttcctcctctctctttctcctttttttttttttttttttttttttggagacagagtcttgctctgtcacctaggctggagtgccatagcacagtcttggctcactgcaacttctgcctcccgggttatgaaattctcctgcctcagcctcccgagtagctgggattataggcgtgtgccaccatgcgagactaatttttgtatttttagtagagatggggtttcaccatgttggccaggccggtctcaaactcctgaccacagatgatccacctgccttggcctcccaaagtgctgggattacaggcatgagccaccgtgcccagccaaccccttcctcctctctaggcaactgctgatcaggtttatgtcagtatagattagtttgctttatgtaaattcaatcatacagtatgaaatgttattgtttcctcaaagagaagtcttttaggttaatctgtgtcatgtgtatgaatactttatatcttttttgagtgttaaattttaaaaaattacatatggcaaaactcagtatttatgatgtacatttccatgagttttgacagctatgtcttatgtacgttttgtattggtgtctagaatctcaaacactaccatcacaatagagatgctattttcttactttcaaacatttcttgtgttgtgcttttgtagtgaaatattctcttcgcccttaatctaattctgagtggccactggtttgttctttattccaataactttgccttttctagaactgcttatcaatgcaataatacaataagtagctttttgtgtctggcttctttcaataattttatcatttacacattctaactaggatcttacatttttaaaggtatcatgtatccttatgaatattcattttttcagatgttttaattactggaaataagattactcatcttatttcttaaaaatctggatcttatgcgccaatatatttaatatacatttttgtttagttactagatgagatttgtttttcccctccagctttattggtataattgacaaataggaattgtgtatatataaaatgcacaagtagatactttgatatacattcacattgtgaaataatcatcatactcaagctaatgaacatatgcatcatagatttaatatcatatttagtatcttaaaattaaagaagtattgaaggaagccagactcggaaggctacatattgcatgatttcatttataggcagttccagaaaaggcaaagcttttaaaagatttttgaagtttcatttactcatggtcaactggggtctgaaaacagatgaggcagtacaacaagatatataagatatatgagagagagagagagaaagaaagagagataaaccacattcacacaacttttattacagcatattggtataaatttttattttattattagcctttgttgctaatctcttcttgtgtttaatttagaaattaaactttatcatatgtatggatgtatcaaaaaaacagcacgttgtgtataaggtttggtactatgaatggtttaaggtactcattgggggtcttggaatgtatcccttgcagataatggggggctactctacactatagagtattatgaatcatggtcatcatactgtccattaaatctccagagttcattcatcttgcatagctgaaactttgtacccttgaccagtaacttctcaatcctctctcctgcttcttctgggctccctggaaaccaccattctgctctctgattctacgagtttgagtattttacataccacatagaagtcagatcatataggatttttgtcatgagtcatgagtatgtgggtctggtgcacaggtggtaaaaagaatttactaagacagttgtaggtaaagaaaggcagatttattagaaaatgtataaaactatgttgcaagaaagcaatgggcaagtcagcaagagaggtgctgactgccaggagataaaggcttgctggggattttataggatggtgcttgtactgtgtgctggagagggctatgtgcagtactctattgccaaggttgcagtgatctaacgtgcattttcctatcaatcagccgagggtctcatgataattcaggtgcaggaggattttgaattatttgtgcaggagggctatatgttccggaccgtaaggaagggcagactgataatttatctgctttctctttttgctttcccctgctcccaccagcctcactcattttctctaattagtgccccattgatttgtctttccgtgtctcccttatttttcttagcatagtgtcctccagattcatccattttattgtaaatggtagggtttccttctttttttaaaaactgaacagtagtccattatatcttttgtagaacggaaaaatgtatatatcacattttcttcatccattcatccattaacagaaagtttgattgtttccatatcttggtgattgtgaataatgctacaatgaacaggggagtgcagatgcctgtttgagatactgattttatttccattgattgtatattcaaatgtgggattgctgggtcatatggtaattccaactctatgctgcttttcatagaggctgcacaattttacgtttccaacaacagtgcacaaggttctcaatttcttcacatcatcatgaacgcttgttattttttgtctttttgatagtagctatgataatgggtgtgagatgatagatagctcatggttttggtttgcattttttctgatgatcagtgatgttgaacaccttttcaagcatctattggccattcgtatgtccttttaggaaaaatatctatgcatgtcctttgtccattttcaattggattgtttatttatttttttgctattgagtgtatgaattaattacatattttggatattaacttcttattaaatacatggttctcaaatactttctctggtctgtaggttgatgtctccagctttgtcttcttggtcaggattggtttgtctattttggctttttttgtgattccataaacactttagaattgttttttcctatttctgtagaaaatgccattgggattttcctagggattggcttgaatctgtagattctttggtagtgtggatactttaacattattaattattcaaatctgtgaacataagagttctttccatttctctgtgtcttctttaattttcttcatcaatgttttatggttttcagtgtacaagtcttttacttctttggcttagtttatcctaataattttattctttttgttgttattgcaaatgtaattgttgccatattttccttattggatagttctttgttagtatacagacatacctccgatttttgtaggtttattttgtattttgcaacattactgaatttattagtttataattattatttattagtttattattttagttattatttattagtttattttagttatttattattagttattatttattagttattatttgttagtttattattagtaattattactaataatatataactattatataatatataatataactattataatattataactatatataatatatagctattatatatataactataatatataactattataaataaataataacgaatagtaattagttattattagtttattattagcaattataattattagtttattagtttataattttatgtgtgcatattaagtctttagggttttctacgtataacatcatgtaatcgtctttttttttttttttttttttgagacaggatcttgctctgtcgctcagggtagagtgcagtggcgtgatcttggtcagcttcccaagtagctggaattacaggtgtgcacaatctcacctggataatttttgtatttttagtggagacaggtctaaccatgttggccaggctggtctcaaactcctgacctccagtgattcacctgccttggcctccaaagtgctggcattacaggcttgagccaccacgcctggtcaacatcatgtgatcttgtaagagatactgttttacttcacttttttctgatttagatgccttttcttttcttgccgcattactcttggtaggacttacagttccatgttaaatacaagtggtaagagtgggcattcttatcttgttcctgatcttagaagaaagaattttagtttctcttgattgattatgatggtagcagtgggctttttatatatgaccatatttgtgttgaggtaagttccttcaatacctattttggtggtggttttaatatgaatggacgttgggtaatgtcaggtatttttctgcatcttttaaaatgatcctgtggtttttattcttcattctgttaatatggtgtgccatgttgatggatttgcatattttgaaacatctttcatttcagggataaattctacttggtcatattgtgtaattctgttcatgtgtttgaacttggttttctactatgttattgaagatttaaaaaatctatgttcattgtgaatattagattgtagctttttttcttttcttcttttgcttttatcattttagatggacacaataataattgtatatatttatggggtacagtatgatatttcaatacatgtatacaatgtgtaatgatcaaagcagcctgattagcatatacacctcaaacattgatcattactttgcattgggaacatgcagtatctgctcttctaggtatttgaaaatatacagtaagccaggtgcagtggctcatgcctgtaatcccagcactttgggaggctgaggtgggaggatcacgaggtcaggagatcgagaccatcctggctaacacggtgaaaccctgtctctactaaaaatacaaaaaattagcagggtgtggtggcgggcaactgtaatcccagctactcaggaagctgaggcaggagaatggcatgaacctgggaggcagagcttgcagtgagctgagattgtgccactgcactccagcctgggcgacagagcgagacttcatctcaaaaaaaatatatatatatatacagtaaattgtgtaatacagtcaccctacaatcctatagaacactagaacttattcctcctatctagctgcacttttgtatccatccatcaatctttggctatattcccacctcccccaactctttcttgcctcaagtaacccttagtctacactctccttctatgagagcaactttttaaccttccacatgtgagtgagaacatacagtatttatctttctgtgtcttggcttcttttgcttaacacaatgactccaagctcatttatgttgctgcaaatgacagcattttattctttttcatagctagatcatattccattgtgtatttataccatatgttcttcatttgttcacatgttcatggacacttaggttgattccatgttttgtccattgtgaacagtgttgcaataaacatgagagtgcagatacctctttgatatactgacttccttttgtctggatgtgtacccagtaatgggattgcttgaccatatatggtaaatctatttttagttttttgaggaaccccccatagtgtttttcctcatggctgtaataatttacgttcccacaaacagcatacaagagttctcttttctttgctttctcactagcatttggtatcttttgtctttgtcatagtagccattttaactgggatgagatgatatctgaatgtgattttgatgtgcatatcctgtatgataagtgatgttgagcattttaaaaatattagttggccatatgtatgtcatcttttgagagatgtttattcagctaatttgtccatttctttttcttttttttttttgagatagagtttcactcttgttgcccaggctggagtgcaatggtgcaatcttggctcactgcaacctctgcctcccaggttcaagtgattctcctgcctcagcctcccgagtagctgggattacaggcacgggccaccacgcccagctaattttatatttttagtagaggcatggtttcaccatgttggccaggctggtcttgaactcctgacctcaggtgatccatccacctgagcctcccaaagtgctgggattacaggcatgagccactgcacctggccaagttgtccatttttacatcagattatttgtattttttttgacattgaattgttcaagtttctcatatattgtggatattaatcccttgttgaatgaatagtttgcagttttcttcccattctgcaagttgtctcttgtctctgttgattgttttctttgctgtgcaggagctttttagtttaatgtaatccaattagcctatttttgcttttgtttcctgtgctttcaagttcttcaccacaaaatctttgcccagatcaatgtcttgaagcatttcccctgctttcttcgagtagttccatagtttcagctcttaatttaagtctgtaagctattttgagttgattttattaatatggtgagatataggggtctagtttcatttttcggcatacagatatttaatgttccaggcatcattcattcaagtttttttttctcttgcctaattgctctagctaggacttccagtactatgtcaaataaaagtggtgacaggccaggcacggtggctcatgcctgtaatcccagcactttgggaggccaaggcaggcagatcacgatgttaggtgattgagatcatcctggctaacatggtgaaaccccgtctctactaaaaatacaaaaaattagctgggtgtggtggcacatgcctgtaatcccagctactctggaggctgaggcaggagaatcgcttgaacccgggaggcggaggttgcagtgcgccgagatcgtgccactgcactccagcctgggtgacagagcgagactccatctcaaaaataaataaataaataaataaaagtggtgataatggacgttcttgccttgtttcaaatcaatacatgtaacacatcacatcaacagaatgagtacaagaaccatatgattatctcagtaggtgcagaaaaagcgtgataaaattcaacagccctttatagtaaaaactcttaagaagctgggtatagaaggaatgtagcccagtacaataaatcagtgtatggcaaacccacagccaacatcatagtgaatagggaaaagtacaaagctcttccaggaaatgtaaagaaccaataaatgttcttgctgcctttgttgaaaatcagttggttgtaaatgcttggacgtacttctgagttgtctatttagtttcactggtctgtgtgtctgtttttatgccagtactatgctgttttgtttactctaactttgtagcctatttttaagtcaagtcatgctatgcctccagctttgttctttttgctcaggattgctttggatgctcagagtcgtttgtggtttcatataaatttcaggattattttttatatttctgtgacaatatcattgatattttgatagggattgcattgaatctgcagatcatttttggcaacatggtcattttcacaatagtgatccttccaattatgagcatggaatatcttttcatgttttagtgtcctcttcaattggtttcctcagtattttatagtttttttggtggaggtcttccacctcctttgttatagttattctgaagctttttttttggtagctgttttatacgagattgctctttaatttctttcttttctaatttgttgttgatgttcaggaatggtactggttttagtatgatgattttgtatcctgcacctttaataaattcatcggtcagtttaagagtagtttggtggtgcttttggggttttctgtacataagatgatgtcctctgcaagcagagacaatttgacatcttactttccagtctggatgcccgttatttctttctcttgcctaattgctctggctaggacttccagcactacattgaataaaagtggtagaaatggacattcttggcttgttccagatcttggaggaagagctttgtacttttcgttattcactatgatgttagctgtgtgtttgccatacattgatttcttgtgttgggctgcattccttctatacccagtttgttaagagcttttactatgaagggctgctgaattttatcatgctttttctgcaccaatcaagatgatcatatggttcttgtactcactctgttgatgtggtgcgtcccacttattgatttgtgtatctggaaccatccttgcatcctgggttaaatcccacttggtcatgggaatgatcactttcatgtgctgctgaatttggttggctagtattttgtggaggatgttgacatctacatgtatcagggatatcggcctatagttttctctctctctctctctcttttttttttgctgtgtgctcctctggttttggtatcaggataatgctggtcttgcaaaatgaatttggaagtattccctactcttcaattttctggaagagtttgagaagaattactattattttctcctaaatgttaggtggaattctgcagtaaagccattggcatctaggcttttctttgataggacacattttattacagattcaatttgtttgagataggagggctagatgggactgactgactagttctcctcacagatcacacatgatttggtaaagtagtttcccttgagggcaggcttttgttatatagcacaggatactttgggcttacttcaaaatgcttgtttccttgggtgtgtttcagaatgattattttcacccctcctcctgtctgaagcatgagataatttttctccagtcttcatcatgagaatcttgtgtgtctcctggaggaaaaatctcatgaaagtatgggtgctgaccccattatgagactgggttcccaggttttaagtctcaagcttgtccacccttagcctccggcaatttaattactgttcacctgtccctatcagttgctggttcccaaggcttccactcctcaaaatctgatcctctatatttgctgtctctccagtttggggggcattgctttgccctatgaactcaattctctgaagaatttaagaagggctattgattttcagtttgttcaaccttttgttgttgtgaggatgggagtaacaagctctttacatgctggaatggaaaccagaagtctagatctatattttctatttctcgttatcaagttctctttcccctatacttttgtcaatatctccttttcatgtggaaattttcagaagctttcacaagccaagctggagcttctatcccagggctacataatagagttcagtttgtttatttatttattttttttgtagagacaggatctcccttttttgcccaggctggtcttgaactccagtcctaaggtaatctgccctggcctcccaaagtgctgagattataggcatgagccaccatatgtgaccttttttttgtttttaatgctatcttgatctagttttgaagccctggcaagaggctggtgagttccctttaatgggctctcacattctgggtcactatgcacaagctctaatcaccccagggccaggtaccagacagctagggatgacccctattccctgaaacctgtgaaattgttcaaactcatcaatccacagggagcctgaaacctaactagctccactaaccctgcttgccatacataagcagccctctacagttattccttactgttaccctgtccctgggtgcaaccccctgcatacccttgcctgacagccttctcccctttggagctgtaagtaaccaagcgttctgcttttcatgtgtctgagtgtcagcatgttatatcccaccataaaaagaacctttacatcttgtaaaacaggctgtcctttgacttcaggattttacccttccaagcccctcgagttctgtttctaaccaggtacttcctgggcatctacctccagcttagaggtgtgggttaaggctcccctaagggtttgtacctaaaagtatgaatcagtttccaccatggtgaatctgggcaattttataatagctccaggcatggttcctacagagactggaagactatacagtagtggctggatgcctgcaacagtgtaccctgtaggggagacccacccttcagtatgccatagctatgaccaatactggtttccttatttatgacccaacctgtccctagggcatgaagaggatgcccctttgtttccaagttgccttttactcttggtatgaaatccaaactcctagtgtgtctggaacgattccttaggttccaacccttcccctgccatgatgaatgcttctccaactataccccaaactacctccacccaacagatctccctaaagcctagtccattgagctgccaggcctttgttcagatatcttctctgccaggagcaacctccaaggaatttgcatttcttccaggtttccaggtactgctgatgttgctggtatggagaccacacattttaatgtaataagtgatttattcacttactataaaaatttacatattctctgaacatttcctgtgtttatgtcttggactttatttcattgcttcaattctcccaagctttacaaccaggaaatgggttggtatatttcatattaaactgatttaaataactacaaaattagcaaaccaaggtcagtgacagataattgcagattttcagtcacataaataatgactaattgtcaatgagtaattttgtatagtactattatttttactaaaataaatttttaagggagaagtaaagctgcaaataattaagcaatttgtttatacattgggatccaccaccttccagaaagtcacattcttctcagtgtaagtggtgagcacttacacactttgtcctgtctacctttttcttgacatgttccaatcttgccatgtaatttccattgactttctatactagtgggttctaatagaaataggttgtctcagcttcgagggagattaagcttagcaggtatggtttgaggcactctgaaaattaccctgagaaatacattaacttacatggttggggccctccctcttgccaaactgctattagaataaaagatgaggcatctaatttcccaataaaaagaaaggcagtgtatagggttttttcatttcattttttattgtaataaaatatgcataacataaatgttaccactttattttcaagtgtacaattcaggagcattacgtacgttcacaagcttgtggatccactagcattatctatttccagaacttttcatcatccccaaccaaacctctgtatccaataaacaaaaattctcccttcctctctgcctctagcccctggtaacctgtaatttttgtctctatgaatttgcctattctaggatagaccatattaggccacaaaacaagtcttaataattttattttttaagtacaatttccattttatttttccccagagaatagtctgtcttcagtctttaaggactaagctccttacatgggctttggtgggggtcatggggaagcacccgcaggtctaaatcggggagggggtgttgggtccttgcgggcttcatgagatcgattcctgactactttgctgtgaattgcacaactcacacagtaatgtagtttcacatacagcttgggaagcacataggcattgaaggtgcttgcttcagaaatgtccctgactgccgcggcctccactatgtttcaaatgatgagtttttttctttttttttttgagacggagtttcgctcttgtcacccaggctagagtgcagtggcacaatcttggttcactgcaacctccgtctcccgggttcaagcgattctcctgcctcagcctcccaagtaactgagattacagactcctgccaccacgccaggcgaattttttgtatttttagtaaagatggggttttaccatgttgggcaggctggtctcgaacccctgacctcgtgatctgcccaccttggcctcccaaagtgctgggattacaggcatgagccactgcacctggccccagtgacgagtttcttaacggctttgtacttgggcatgcatcgggcacagttcatgcagcaaataggctgcatgtggccgcggccctttttggcatgattgttgttctttcttttctttgtcatctttgaggcacaatgaccagagagaggtagtcttaataactttaaagattgaaatcatacagtgtatcttctgatcacaatgtaatgaaacactagaaacaaatagcagacagaaaacagtaaaattcacaaatatatggcaactaaatggcacactcaaatcacagataggtcaatgaagaaatcacaaggtaaattaggaaatatcttgagggatattacactacctcatatacttatccttttttgtggtaagaacacttaaaatttactctcagaaatgttcaagaatataatgcattaactgtagtcatcatgttgtgcaatagctctcttttatttctcccatctaactgaggttgtgtatcctttgaccaacttgggaccccttagtccctattaaccatcattttactctctactttcatgagtttgacttttttagattccacatataagtgagattatatggtatttgtctttctgtggtttataatttttttatgcatttgtctttttaagttgtgtcaaaaataaaaacgagttacaaagcaaaattaaattatatatatttacatacatatgtatatatatgtaaatatataaatgaatatatataaatatattcatttatatatttatatatttacatatatatatatatatatatatatatatatatatatatatatatgtatatatatttacaggcgtgaaccactgcacccggccaataatattggtttttatatctgtccatatacttaccagagaactttatttcttcacataggtttgaattactgtctagtgtcttttcatttcaatctgaatgacccttagtatttctcatagggtaagtctactggtaatgaacattcatggcttttgcttatctgataatgtcttcatttttccccacttttgcaggaccattgtgctagacatagtatttttaattaacaggtttttccttatatcactttaaatatatcataccatttccttctggagtgcagggtttctgctgagaaatgacttgatgatcttattgaggatcctttacaggtgatgtgttacttttcttttactgctttcaagattctgtcatttggcatttcactattatgtatctcagtgggtttatcttacttggagttcactaacgtatcgaatctacacattcatgtgtttcctcaaatttgagaagttttcagtcaacatttcttaaagtaattctactaccttctctctctattttcctgggaatcccataatacatatattggtccagtgatggtttcccataagttccttaggttttattcactattcttcattctttttactttctattgctgagatctgatcatttaaaatgtcttatcttcaagttggctgctgaagtctgctgttgaactcctaattttttcatcttgactaatagattaatatatttttcagcttcacaatatctgtttggttcctttctatagtatctatatctttttgttgatattctcattttgttttaaatcatttccctgatatcatttagttctttgtgtttcctttatgtatctgagcccatttaataccgttaatacagttactttaatatctgagcatatttaacacagttgtctttgtccagtaaacccaatgcctgtcttcagagatgatttgtgccactttgtattcatcttttgaatggacaatgttttttctatttctttgattgccttgtgattgtttaagtgaaaattgggcatttgaaaacaacagccacatctctcagtctttgtatactgggtctgtttcaggaaagtcctttaataattagctaggaatgttctgtgccttgggatcagtatgaggaaaaagcttaaggttcttgggtattttctgagcatatctcttggttgggtctgtgtgtgtttttttcaatccctctgtatacacagctgcttttaaatgtcttatttttccaaagagtctccccctgggttgtcttggagacttagatggtgtatacatatctccacctgtattcttttactctatgtgtctacaggtcttagtgtccttgcagctttcccaagtagtatttgatgcttcttgctgtctgagatctgaattaggtgaggtagagaccagtcctgactctgcaagtctacccccaccacttcccattattgatgctacagattagatctttatacattgtgttcccaataacaggctaactatttttatgcatttgtcttttcaatcctgtagaagataaaaaaaaagtggagttacaaaccaaaactataatagtattacattttataattcctcatgtatttacctttactagtgaactttacttttccatatggctttgagtgacagtctggcttcttttaatttcaacctgatagacttccttcagcatttttttttcaggacatgtctagtgataatcaactgcctcagcttttgtttatctgggaatatgtgaatttctccctaatttttcaagagcattttgctgaatataaactctctattgacagctttttttcttcagcactttatgtttattgatcagcttccttctggcttctagggtttctgatgagaccctggttgatagtcttgaggatcccttgtatgacaggagttgcttctcttttgctattttcaagattatctgtctttggcttttgacatttgattatgtgtctcagtatgggtctcttttcaattctcctacctaagagttcattctgcttgctggattgcaaattcatgtctttcatcaaatttggagatttttcagccattatgtcttaaaatagtttctctgcccctttctctcttttccccttcaaggattcccaaattgatgttgtgctacagttccactaagctctgttcactcttctttttcatgttgataatttatatttgtcctatttttaagtttgctgaatctctcctctaattgcttatcttttgaatccctctattgtattcatattttttgtttctgttactgtaattttttatccagattttttgattcttttaaaaaatcatttcatctcattatttctatcctcagtttgctcatacatctttttcctttgttcatatatttctttagcttttaaagcatctttaagacagttgtctttttatagtgagtctgacatctgggctgcctcaagtatgttttctgtcaattcattttgttcctttaattgggccatacttttctgttttttggcatgccttcaggtttttgttgttgttgaatactggacatttgaatcttacaatatgatatctctggaaatcatatttccccccttcccctggatttgctgcacttttgcctttgtttgtattattatgagataactgtgcaccagagatcagcctaaaataaaagctgaagaaggttttttcagtgcttgtatctttccatgagcatgtgaggcggctttctgaattcttctgtatatgtagttgtttttgaattaaaaaaaataggtgcaagtctttaaaatctcctgaaagtcacttcatccagtgggggttgaaacaatgatgactagcctacaagcccacaagcccacaagatcagaagcaccaatccacagtcagaacacagaaccatatggccttgtcattgtcttgtatcttgcatcaattacttctgcatatacagcttttttcctctaacacaattgcaatttgtttaaagactgactccccctcaacagcaaagaattaagcgtccaggaagtgctcagtgatatgtgccttgattctttctagatgtttaccaacaactgagctctaatcacatttgactggcccaaggctaacaaggaaactttgactttccaggcatcggtgatcttcaatgacaggctgtaacctctactcaggaagagtgagggcagtggcacccagtccatgggactctgtactcagagatgatgctgaagacctgtagtcctctggtctccatgggtaaagcctcccctttcctctatgtgaagcctgacagcctccttcagttggccttttttccagctctgtagggcaccgtccttccttctcacagacctgctgaattctcatctcatctcctatctggtctctttgtttcccctcaggttattttgggcgagaaacattccctcaaaatggctcagatactaaaggatttgttgtaaggaaatgggtgcattttgtaagagctccctcaaaaatgtgaaacagtaaatacataagagcgacaagtgattagatgtgacatctgagaccagaatgatgaagcaaccatgagaagacaatgatgatgaaatcaatagctaatacttattgaatgctattaagaggccaggcattgttgtaaacactttgcatcaattaactcatctaattttcataataatgctgtgagatagctttattaccattttatagatggagaaactgaggcatgacatagtgaagtagtttgtccaaggtcacacaaagccagtatacatgcaacttggatttaaacccaggtaacatgactccaaagcttaatgctcttcacacacacaccttggagctattaaagggtatgcattgtttatctattaggtccacagtggatgcttaagaaatggttaataggtatgactgaggaaataatatgatgtcagtgacatcgtaacatcattatgacatcagcccaaccttctatcataacaaagtcatggtctcttattgctcttaaaagcttcatatcttaatttaaaaatatggccttctggctgggtgtggtggctcatgcctgtaatcccagcactttgggaggccgaggcgggcagatcacttgaggtcaggagatcaagattagcctggccaacatggtgaaaccctgtctctactaaaaatacaaaaaattagctgggtgtggtggcacatgcctgtaatcccagttactcaggaggctgaggtaggagaattgcttgaacccgagaggtggaggttgcagtgagctgagattgcaccatttcactccagcttgggcaacaagagtgaaactccatctcaaaaaaaaaaaaaaaaaaaaaaagatggccttctttttcctaattctgttattgtgaaggcactttaattccagaaatgtaaagcattattatgtgtatgctcatgctttttaaatgacaaagcacaggtctttggatgaatcctgtcataacaaagtgacatggtggcataaaactatgtgtagtggaaacaaaaaaaatctgggcattataggactacttcatctttgtggtaccagttccttgggagagctgaagaaggacagagaatgagagaaaagaaagctactgtcattatcccataagtatatatgtggtagccagactatccataattacagcagtttgataccacgtcatgcttccttagttatatttactttggagtcagagtggtgtcctgctgccaggctggaaagcagtggtgtgatgatgcctcactgtgaccttaaactcctgtactcaagcaatccctccccactcagcctcctgaatagctaggactgcaggcatatgcctacacctgggtaattaaaaaatatatatttttagagatcgagtcttgctatgttgcccaggctggtcttgaactcctggcttcaaacaatcctcctgccccagcctcccaaatttctgggattacagatatgttccattgcacctggcccttccttacttataagtctaagatccctcaatgtttcatagaatttcaatataaatttcaggattaaaattaaatcaaatgaaagataaaatccctgcagaatagtaaaaatttaccaccccattccaaacctactgtctctattccaaagtgctattggaatatgcctctatgcttttagctttcagttaaggtagtacatgtatcagaggagatatgttttgttgaaagtcagaaaccttatcactcattccacaccagaattattgtatgtataacataatgttccttttaaaaataacatatcttatgattctcacctgccatagtgaacaaaatctgaagcataatccatatcacagcccttcacttacatcagtgtccatacactccaaatcaaattgatctgcattacctttctaatcacaagataggattctaatcacagggccagtgagaccgttccatttcctttttttttctttttttttttttgagacggagtctcactctgtcgcccaggctggagcgcggtggtgcgatctcggctcactgcaagctccacctccagtgttcatgccattctcctgccttagcctcctgagtagctgggattacaggcatgtgccaccatcctcagctaattttgtatttttagtagaggcggggtttctccatgttggccaggctggtctcgaactcctgacctcaggtgatccacccgcctgggcctcccaaagtgctgggattacaggcatgagccaccacgcctggccccatttcttatctagaacttagaatatttgaagccatcctccctacttacaaaccataactatctgtcaagtttcagtgcagagaacaaaaactctcttaactatttcaagacatatattgcagtaaatcagtgatttcaaaattggtaggtgggctgtaaaagtaatgggaacacttctggactagtgatttcaaggtaaactcctataactatgacccagagatggagaaatgacagttgctgaaaccaatgatgctgccagcggcactacctcaaagccacagaatctgaaactagacatgggaacatggaatccagctgcagcaagtatgacagaacttgactatccactttacctagaataacaccctgtgcaccacatacacacacacacaggcacacacagggatgcacatggctacatgagtagtactcattacataattagtgttcatcatttaagattcatttcaaaaatcacatccagctaagcctgctctgatctcttgtagtatgttgtttcttagttattttctcatagcacttgtaaaggattatttcaaatttatttgctatccatttctcttgtcagataatgtctctgtgagaaaaagaccacatttgttaattattacaatggttatcaaaatgtgctttctggacaaaacagtgttactgtcacctaagaatgtgtgaaaaatgcaaattcaaatcaactcatacagaacctagaactgaggctagcttgaggctaaagcaatctgtgctttaacaagccccctagtgattctgacacaccactaaagctcagaactactggattcctgtatcccattgctgtgtaatacacacgagtgatgctcagtaaattttcttgaaatgtagtaagcccactggaaatggactccgaataatcctcaccaaaataccgctattcttagtaaaaagagcaggtgtttttctttaggtttgcttgtctcccactaaaggctatactgaggctaatcttagtgaaatttttttgccagaaatagtcacagagaaagagtacgtgagatacaaaatgattttattagataccaaaacctttattcacaccattttatttcttttgcagctttaatttttaacattataacatttactggctcctctgggtgactaaatatcttcacatgcccactagctaaaaagaatttctaagtagaactcaactgaaactgcaagctactgctctaagaaatgcataatgacatttatttgctctcctgtagaaccctgtttacaaatagcatcactgcaaagatttacacgtaattcctaaaactttcaggttgttcttccattaatcttctgatgtgtagcaagataaacactcttagtgaacacttggctacatctcttaaatgagagttctctccagtttgagttctttgtaaaataagggatgcacttggaactgaagtcttccctcaatttctaaattttctacattcatacagcttctctcctgtaggagtttgtaaaagattcctattgtctatagtctttcccacatttgctatatgtacagggttttatcctagtgtgagtatacttatgtcaattaaggggttaatactgacaaaggctttcccacatttatggtcttcatatgatttctctacagtataaactctgaaaaataaaaacatctgaatcattgctgaaagtcttcccatattcactacattcataaaacttttccccagtataattttttctgatgttaaatgaggatctatgaatgaactttaccatgataaacactgcttcatatacattctcttctgtaagatttctcacatgtatagtgattcatatagtctaaaggcttttccacacttaccacactattgggtttctctccattatgtactctttgatgggcagtaagatttgagcctttgctaaaagctttcccacactcactacatttatatggcttttctccagtatgaattctctgatgtacggtaaggtttgaactacagctgaaggtcttcccacatttaatacattcgtaaggtttctctccagtatgaattctgtgatgttgaagcagggatgacctatgactaaaggctttcccacatatatggcattcattagatagaaatcacatttcaatctaatgtgatttctcaaatgcatattcagtgattcaagctggttgaaggatttcctgcatttctgacattcaaagggtttttcttcagtatgaatactctgatgctgaacaagaaatgagaggctactaaagactttcagacatttgttgcattcatattgtttctccatagtgtgaattctttgatgtggagtaaggtgtgagctacagcagaaagctttctcacattctctacattcataaggcttctctccagtatggattttctgatggtgaatgagagacgacgtatgaatgaaggcctttccacatatacgacactcatagagtttttcttgcgtatgaattcttagatgttcaataagatgggacacacgcctaaaagactttccacagttcatacattcatatggtttctctccagtgtgagtgctctgatggttagtaagtgatgagccatggctaaaggccttcccacattcaatacatttgtaaggtttctctccactatggcttatctgatgtcgtgtaagggatgagccgtggctaaaagtcttcccacattcacgacattcacagggcttctctcctgtatgaattctccagtggcgattgaggattgactgtttgccaaaggctttcccacattccctagatgtatagactttctctattataagtgtggtgaggagaggtgctctggttaacggctgctccacttttattagaattcaagagtttctttccaccattgagtctctcattttttacaactgacttttttggtaaattcttctttaatatattgtatttgtgtgaattccctttagcagaatttttttatggttcagaaagagtagactttgaatgaaaggtgattctaaatgtgtcatatttgtaactgtccccagtggggctttctctagaggtgagagttgctggtctgaaatgttctacatgaattccaggcttcccttccaacttttctatgtgttccaaattcttggtagaatttgaaaattcataactttgttttaaaactttttctattgttactgtttggagtgaatcttccttataaatatccttctttgttgataattccttgttttcccatcttgattcccaacctgaaatatataaagaaagcaaagtactgtttttttctttttttttactccttgaaaagaaacttctatggtggaattaggagaaatggataagaattgaagcccccagaaaacacagagttctgacaattcaaatatttcagtgatttctgaacaatgctcaaatggagcagagaatacagagttcacagaagaagcaggagtgataacagaaatgggtaaaatatacataatagataaaacagtatatgaataaaaggaaactatcagaaataaaatgtggaaggcattctggattccaagccatctctttgtgcctatattcatgtatgaaagattgcattttgtctcatagcctttttctccaaccttccattaatctcaatttgctgccagattaacatgcttaaaatacagaattgatactactgcattaaacagttgcaggaaaaacaaaataatctaagtgctgtttagagctgacaaagatttaggccttctgaggttatgaagaaactgtgaatcatatcagttattggacattagaaaatattattcctaggaacatattttatatgttccttacttcctctaatatgttcatatttcatctacaaagctcagctttagaaaagtgattttccatctaattgtcagcttttcttagcctaaaagtatcagtttgttttttcttatgtagatttaagaaagaataatttgccttactttgtcatgaatagagtaacaatttgaattattataatgacaaaaacctctaaccttgattagatgacatgagtgatacagataataatgtgggatagaggaacaattattttgaaaatctaagctaaatatccctcaatttttcattaatatttgagatatttgaagatagtgttcctaaaatgcctccacactcactataaacatctttaaccaaatcttcctttgtctcattcaccatgactcacctggaatcataccttttgacagttttttctccaccatccagggctctttcccatgctccaacaatgtgatcacatatggcttagttatggaaagacctgcttacaggaagaatatagaattgtttaagctgtggtcttctattatgagaggccatcaaaagagggaccacaggaatggatgaagggtgttcattgaaatggaaagataagctttaggcagggcacaacagagctgcacatttcctcgggagcatggtacagaattcagccgtttacttaggagaatctccagcaattcagggtggcaaaagaaaggtgtcccctgttggagtggaaggggtgatatccttacctacagagacaaggttctcataattctggaccatcacatccttgtataagtccctctgagcagaatctaggcatgcccactcttcatgagagaagtctatagccacatcactaaatgtcacctgaaatagcaaatatatttaggctcagccatagcccaggcctcttctgtcactgaagaagaggtaaaattagcctggttgtggaagaaatggaacaagattcaggagtcgtgacaaagattgggaatgtgatctcagttaagtaataataggacagttacgtagatggaattattacataataaaggggagagttatgtgtttagaattattatacaataaggatgagagacaaatatgagagctttgcttcagtagagttaactttttgttaaaagttatagaattgtatgaatttttaaaaatcagcatttaacatttgacagcacagagtcaagtatttggttatatattttataccttaagtactaggtaagtaattaaaaaatgaggctaaagcgattctctcttgaatgggataccaggatgatccactaaccctcataaaaaatgggtttggaaaaaagacatctttatattaaagactgatagacatacactgttatggtttgattgtgtctcccataaagcatgtattgaacttaataaccgttctaacagtattgagaggtgagatctttaggagacgattaggccttgagggctctgccgtcatgaatggattaatgtcatcatcgtgggagtgtgttccttatttaaaaaatgagtctgaggcccctttttcctctctcctctttttgcccatccacccatccaccataaaagcacacagcaacacggcccttgtcagacccctcccccttgatcttggacttctcaggctccaaaaccatgagaagtcaatttcttttttttctttcttttttctttttttttttgagatggagtctcactctgttgcccaggctagagtgcaatggcacgatctcggctcactgcaacctctgtctcctgggttcaagtgattctcctgtctcagcctcccaagcagctgggattacaggtgcccgccaccatgcctggctaatttttgtatttttagtagagacggggtttcaccatgttggccatgctggtcttgatctcctgatctcaagtgatccacccacctcagcctcccaaagtgctgggattacaggtgtgagccaccgtgcctggccaagaagtcgatttctattgtttgtaaattactcagtctgtggtattctgttacagcagcacaaatggactaaaacatacacataactgattcataaaaaagaaaaatatatttatggcatatacttaaactttgtactgatagacatttaataactaaaatatgagacccctgggcgaaaagactgaaggctggtttcatgtcatagatcaggggtccctaacccccagaccatggactggtactggtctgtggcctgttaggaactgggccacacagcaggaggtgtgtagtcggcaagtgagcattaccacctgagctccacctcctgtcagatcagccgtggcactgcattctcataggagcgcaatccctactgtgaactgtgcatgcaagggatcgaggctgcacaccccttatgagaatctaactaatgtctgatgatctgaggtggaacagtttcatccccaaacaaacacctcccacttctggggaaaaattgtcttccatgaaactgatccctggtgccaaaaatgttgggcacccctgccacagacagtccttaactaggacctgaaactaagcggggaacaaaagggtacatttcaaagaaaatattctaaggaaatgctcacagatgtgcttggaaattcctctcaatagtactcatttcaaagtattatttaagatagtaaaactttagaagcttaaatattcaataatagcttattgactagtcaaattatatgtgcaaaaatacatccatttaatatagcattattactgtctttgatttgtgaaagactgctctactgtggtaattttttagctctgagagttaattcagcactgtattacattatttggatattttgcgtgcatgttcaccagtgacactggtctctggttttaaaggcagaatttacttttgtcaggtgttgggaaaataattaaaattcaaatctcctgccaatggtagaaaatcctttccacagatgtagaaaagaaagaaaagagttttattactgaataagcattaaataagaccttgatgcatgtcacaggcaatccactaatgagattaaaaggacaggaagaaatctcactcatccttttatatcaccaagcagatacaatccaatacatacattttccaaataaacaataacttatccaagtaagacctgacagttcaatttgctacgcataatttgtcctaaattcacccattaattggagttgacactgttagttaattgcctttatcctaaataaaaataacgtttctcatatctttatgacagacaagtcattacaacttagagccaggaatgcttctttcttcccctgcagttgcccgggcagcttgaaatgttcactcatctctgtccccaaaagaacataggatatttgtcctagcacttatttaaatttcccatgctttcttacttttctacagtgctgcagtcctcaatacagtagccactagccaatttggctacctacatttaaattaattaaaatgtaaaaataaaataaaatttaaaattcagttcctcagttgcttaagccacagttcaagtactcaatagtcatatggggctggtggctaccgtactgaccagtacacatgcacagcacttccaccactgcagaaagttctcttagacaatactgcactagatcatgaagtcctgtgtgtcagtgtacaccacaatccatgtacaacttttcctaccaggtacttcataagtgtttagaagatgaaccaatgaatgtttttggcattagttcactttagcctttactttgttttttttttttaagagatagtatcttgctctgttgctaagctggagtgcagtgacataatcatagcccactgcagcctcacacccctgggctcaagcaatcttcccacctcatcagcctcccgagtagctgggacaacagacatgtaccaccatgccagtttttcaattctaattatctattttttccaagaaaacagacttcacccaacatgtacatctgctactcatatcccctcctatgcaagcttcaccttccatgccatgattctgccccaccagttcttcattactcatcttattcactccacagttacttactaagcatctatttggtgccaggtaccactctgggtactgaagctataatagacaacaaagaagaaaaaagattcctcccaccaggaaaagacaatgagcacgtgcatatagtgaacatacagtacatcagctagtgagtgacacacgccgtggaaaacaagaaagcagtgacggaggagtggaagtgctaggtgttcagggaagcttttctgagaaagtaaccaccagaacccaaaatgtactaaaagattggacttatgtgtccttaatgaatgtgtcaaatgagtctcctggaaggagcatgttattaatatcatgtcatacctgtgctcttagagaaagaaagatggatgcagttcagattttgtctgcagatattgtacatgatgccaaagctaacaaggtaccctctgggtggcctgggaaaggtatgttgcatgccttcagaggtggagataaattgcagtagagaggctgttgaaattggcaccaaacagatcatgttagccaaatctacaagagcaaaatatataccagtttttgactgaatagaatcagcaatgttaataatattggatattggctatggaggcctcaatggatgggaccacagcattaaggtgtagtaatccatcaggaattttatgctgtttagagaagaataaaaacttaaaagataggaaataaactaaatgaaaaaataaactaaaatatatagctgggcaaaatgtattatattaattaatgcccaaagtttgagtgttggaagagggagagttgaattaatgcagagaccatgaacaaggaaaagtgaacatgtacttttattgttaaattgtgtgatgaataatgcaattgaccattataaatagaaattcaactacatgaagcatcaatatcttatagcccatcctgaggctatcgagatgctctaccttaaggacctcattagcataaactcaggggtcatcagtggggctcactattaataacaaaagacactcctatcactcaggacattccaggggtttcagcactctgagaggaactgatgacaaagaccaaatatatgtcctaccagaatcttgcttgatcttctctcaacttccttgatctgtgctttttgatgtctgtcagtaagtttggaaaactttcagtcattatcacttcaaatcggttttctgctcctttctctcctcctctaggattcattctcattatgcccatgttacatcttttataactgtccatagttcttggatattctgtttcagttccctccctctctctctccttctctctctttttgctttccagtttgagaagtttccatcaacatgtttcacactcacagattctttccttgatcttctgtattctgttgataagcccatcgaagacattcttcatttctgttacagtgttttttatttctagcatttccttttaatttttttttttgtgtttgcctctctctgcttatattacacatgtgttcgtccatgttggccactttctccattagaatccttagcatattaatcatagtttaaaatcctggtgtgataattccaacctctctgccccagtgtctagttgtgatagctgctttgtctcttcataatgtgtttcttcctgctgcattagtcttcttgggttattcttcttaacagaatgccacagactgaatgacataaacaagagacatttattcgctcacaatcctggaggatggaatgcctagatcaaggtgtcagcagagttgggttttggtgaggactctcttgcaggcgtgcagacagctgccttcttgctgtgtcctgacatggtcttcagtctgtgagcacacaccctgggtgtctcttccttttcctataaggactgtagtcttatttgtttagggatccatccttacacctcatttaaccttaatgacctctttaaggtctctgtctccaatacaatcacactgggggttagggctttaacatgaatttgctggggagggatgggcacaactcagtctagagcatttaccttttatcatgttgtgctatttttgttgatagccagacatgatgtatcgggtaagatgaactaaggttaataggactttactgcgaggttttatgtttatctggctagaattttggctgtttattatttgctgtagcagtagatttcaggggattaaatttcctctaatatccttgttggtgtctctgctgttgtctgtgggtttccctagaaattcctgtctgtctcttgcagctctatcagttaccatctactgttttttgtttattatgatttttatttattttattattttttgaaacaaagtatccctccgtcacccaggctggagtacagtggtgcaatctcggctcattgcaacctctgcctcccaggatcaagtgattcttttgcctcagttttccaagtagctggaattacagatgcatgccaccacgcccagctaatttttgtatttttagtagagacctggtttcggcatgttggccaggctggtctcgaactcctgacctcaagtgatccacccacctcagcctcccaaagtgctgggattacaggtatgggccattgcacctggcccatctgctgttattataccgcagacctgttgatgtggtgataaggtattgtggagaggcagcatttttgaatctcatgattacatctcatgattacatctcagttttattagtgagactgagtccctgggctgaccttcagaaaaatttcttagctttcttttcttcctttatttgagataggaagactagatggaacagactgactagttcttctcacaggtcacacacgatttggtaaagtagtttcctgggggcaggcttttgttatgtagcacagaatactctgggcttatttcaaaatgcttatgtttccttgggtgtgtcttagaatgattatttccccttcctcctgcttgaagcatgagataattgttctccagtcttcatcaggagaatctggtgggtctcctggaggcaaatctcatgaaaatacaggtgctgctcccatgataagactgggctcccaggattttttaagactaaggcttgtccaccattagcctccagcaatttgttaatcactgttcacctgtcagttgctggctccagaggcttctgtcctcaaaatctgatcccctatatttgctgtgtctccagtttgggggggcattgctttgccctatggcctcgatactctgatggatctaagaagagttactgattttcagtttgttcaactttttgttgttttgaggacgggagtaacaagctctttagatgttggagtggaaaccacaaatatatatatatgtactatttctcattatcaagttttatttcccccattcttttgtcaaaacaaatgttggatagttataaaagctttacagcatatttgtccactaatttcatcattttcatcatttttgtgcttctcaattcactcttctggttaatgatttttatgtcactacttctttgtgtgcatggttattctttattggatgccagatactgaattttacattattgaatgttgtatttgtttgtattgctttaaacaatgttggaccttggtatgccattcaataaaattacttagcagcatgatttcctcttgcctgcttggcactaggtctttctgttttaaacttttttagtataagaccagagcagccttgagtctgtcagccccgttctttaggtgatacctttctatctggtgttttctgtactaataggtgttccacactggcaggtgaacatacaattcccagccctggatgagctcaaataattgtttgggatattgctttgtaggggttcctttctaaacctcaggtagtgtctggtcatgcttgtgcagatcgggacttagccaaagatttacatggatacttctgcaaatctttgcctctctcctctctcctattatcccacctaaattatacccatggtggtcaccatatatacttatttttcttctacactgtaagcaggaataattgtagggctcacgtgttgtaacctagtgagttacagagaaacaccacactctgagacgaattcaggtgtcctttattagccagcgactgagagatggctagtgctcaaaattctctaggccccaaagaaggggctagattttcttttttactttggtttagaaaggagagggggggagtctagttaaaacaatcttacagaagtaaagcaggcaaaaagttataaggataaatggttacaggaaagcaaacagttccaggtgcaggggctttaaatctatcacagggtgacagatgcggggctttgggtgttatcaaccagatgaattcctaggaactgcggatatagctttccacagtatcttatcagttaattgcatccttggatgtgttgggaatctgcttgcacaagtcaagtcaagtccttgaggaagggagtgggtaaggggctgtaagtgaaggagccaagatggagtctgtctggctctctcagctaagggagagtcaattcaggttaaaacaaggttgggtatcacattccccacttgtgtttttggggaatcaaaccattgattcctcggttataaccagggggttatattgggttttaaggtacataagcttgacagaagctatatgttgttttacaaaattaagaaaccaatttaacatacaaggctcaaagactaagcctaacaataggggagaaagggtccagctaacccagtgattagagtagttagcaatggattccagttaaacatgctttggtaccagggggtgttattttctcgttcttgctggtgcctgtctaggttttctcaaactttttggagagtatcttttatgactccagactgattggcacagaagcaacaactctctcctagagtggcacataaccctccttgggagagaaatagcagatctaagcctcggcggttttgaagaactacttcagctagagattttacttgggtatgtagtatatttatggctgattggagattgcttaaatcagcatctacttgttgagacagggacattagtccagtttctccctgaaccagggcagccatgctgatggctgctgatccagctatgctaaggccagccaggaggggtacaaggagtggggtggctcggcaaaacctgggatgtaattcagggggagcaataagaagttatccttctggcccactatacacgtagacctgggggagtacatgaaccaacacacacaggagaggtcctggtttagttccattgatgtggcaagtgagacctgaagtgcaggctaaccaggtattgttaggtgcctggtaggagactgaggtgcttaaggaggtaagcatagactgattacaggtagcctgaaagggagaagcagataagttatatccggtgctaattagacaagaagtgtttccagacgtatctcctaatgggagggcatgggggcatgtacaacaagaaagagagccaattttaagtgcggcttctactcctaatccaatataatatgggggtttgtcctttaggcacaaccaacaatcttgggctagtttaggctgggtgagattgaggaggtgatgtaccccacctagaatggacatcaggctgggttggaggtgctgtcattgcaggtgaggtttggggaccaggaatggcagtgggacagttaaatcaaccttgtctggatgttttgggaacataaggtcatctaaatcagttaaaggcctgattggcttaggagggctccatgagacgaggattttttttggatggtgaacatagttccaacatcaaatcccgggatataaagccttaatccctatgacatgacataataccattgagctaaattaggattatggatgtttatagtgagaggattgcaatttctcctagtacacagcttaggacgggaagcacgagctatggaaagggttgaagatcgagttgatgccccagagtaggtggccaaagttacacatgtccagtcagggcagaaaaactggtaagaatcttgacaactagagttagggtgatttccaggacagaggtaaaagtcaacattctgaagtcctttttctgcacctttggagtttccacatccagtctggcttctggagtgtccaaattccacagcaaagtcgacgatacctgctcctatgactggcagattgcattgttcttcatgggtatgggcaggctctgggaacaaagtacataaatcaactgtaaaagagacttccttgagattcctgccttccaagtagtgtttgcaaacacacatcctgctgtgaaagaagtgaggaggaaagagtaggatggggcagaaggcataataggtggaaacaaacaatagaggtaaataaaaagaattaatctgatggcttcacttgacttaggggcagttttaaggggcctggcccaggcttggggacccatgtttcttgttgggctctgttgtcctttttgatgtgagattgatgaatccaagctggaatgccatctactttcagagccgttggtgtggtgaggatgacagtatgaggtccttttcaggcaggaatgagtcctttctggaactttttaatgtacatgaggtcacccggctggaaagagtggtagggccccgtctagtcaggaactggattggggtgagctccccggacaagcggctggatgatgtcttgtacctgttggagagacttcctgatttttactggcctgaagatccgaagcctgtttttcctcctctggggaatattttgggtgatctggcaagtcaggttgcagaaaggacactgcaggcagcagggtcagaggtgcaacagggagacgagctgcctcctaggctgtagagtctgctttttggttaccatgggcaatggccatgtcttctttttgatgtcctttgcagtgaattacagccacctgctggcagtgcttgggcctacagtatatccatctctgtagtgatggcagcaccagccttttgaactccctgctcaaggaagctgctaccatctctaaacacggtggcttctgcctcctttaaagatacctcttggagatcaggtcggccagattccgtagtctccaacggttcttggcagtcatggacaggtatagtaaggtctgtctcttggtggtgggagtggggattcacaggatggcttcacactggtgagtgccctttttcctttctttatcttgtaccttaggtaggacactctaagaagacaaagctgggcctttttggccgagatccaatacctgagcacctgaaggaggtaaagtaggtccctagtatgttgcaggcagctgtcagtagtttcagtagccaataagtcatctacatactgaagaatagtacaattggggtgactggctcagaatggtataagatcctgttggagggcttccccaaaaaggatgggggaatttttaaagccttgaggtaactgagtccaagttaattgggtggtatctcctgagccaggatctgtccattcaaaagcaaagataggttggcttttgggggccagaggaatagcaaagaaggcatcctttaagtcaaggacagtgtatactgtatgttctggtgggagcaggctgagtaaagtataagcattgtggacagttggatggatggtaactgtccacttgttaacctccctcaagtcctgcacaggctggtaatcatttgttccaggtttctggaccggcaaaaatggagtattccaggtggattgacatggtgtgagtatgccagcttgtagcagtcactgaatatggagatttatcccctctctagcctgctgactcataggatactgttttatctggactggcagggcagtggccagaagttctacaactactggcagatgatgctttgcttatcccagggggtttgactcagcccagactcgaggaaacagtctgtaggtctaataggaggagagaatttgttttattctccaatggttgtgatggtgaaaccaaaagatattcctctgacagaggggtagttagcaggagttgggcagtagggggcgttgtgtcccctaacgtgaagtgagcctgctgggctgagagatagaagcctgtaacttatggagcaggtctcatctgagaaggggaagggggcactctgggactacaagaaatgagtgagttactcttttctttcctaaactcacttatcatgagtgggtgacaggatattcctgaatagctcctgttgccccttgtacagctactcttttattagagacactgcctaagggtgtctgcagtactgagtgttccacctcagtatctattaggaagtatacatgctggccccccactgtagcggtcaccatgggctcctgggggccaagtgaaagggagccccagtcccatcagtcatcagactcctccgctgtggggagggtgaggacctttttcttttctggtttttgctctggctttaatgggcattccttcttccagtgtcctatctgcttgcaataagcacattggtttttctccaggggagcccgctcacctttcttgcccttttggctgggacccggggttccctggctattcctctgtgatgggggcccttactttttggcttcctggatggccaccactaagatttttgcttgtcttttggatgctttatcagcagctttttcagctgcctcagctgcctgttttcgtttttcagactctcgattgtcaaaaactttctgggctacttctaaaagctggctattgttcattccagcaaatccctccggcttttgtaattttcttttactatcagtagctgcctgagccacaaacaccaaattaatagcacggctattcttgggagctgccgggtcaaaaggggtgtaagtttgataggcctcctggagactttctaaaagtgttccaggttcatcaggcccctggacaacttcagttgtctcagacagatttatgggtttttgagcggctcccttgaggcccacaaggagataccggtgaaaatcatctaaagccctcctcccacccgaggagttaggatcccaattaggccgggtagagggaaaaacctccttaacgaggttttgggcttccccctctggtctatcagctgatgtaaggaaatactttctggcttctcttcggatacaattcctctcttcagagatgaagagggttaaaaggcgttgctgacaatcatcccaggtgggccggtgagtctggagcatggactccatcagtgaggtcagaacctggggtttttcaaagaaggggggattatgagccttccagttgtacaggtcagaagtagagaaagggacgtaaactaagaatggagctgagcgctcatcacccggagggatttgtgcctctctcagtgggaggaggggggctacctcctcctgccatggccacaatcaggaggcaatagatggggacgccacaggagatgtagttgaggaggcaaggggagattctgggggagcaggagggttataaggtggcagaactgtgtgaggaaaactttcctcttcttcagagggaggcaatacaggaggagccaagggagctgaggatccggacaaaagtgtgtggtctcgcttaaaatgaccttggaggtaagattatgaatggcacatgagcggagccaagggggagggctccggaccaatctcagccattgatcaatgtagggaaacggatcggggtgaccgggagttccagcaacgacccgccacacagcctgaagagctgtgagattcagtgacccttctgggggccacacggttccaaactgtggtcattctacttcacagagtatctggagtttgccttttttaaggtggaccccataattctctgagaagcctagggagaaattttgtaacatacattggagagggctccaatctttatgaggctgggaagaagagtttcccattctggaggcaatttaaaaaggtttcagcagaaatattaaacccagcacagacagagaaattcaagacctggggggctgcagtatcagaagaacagaagtattataaccagaagaagaaggaaaacaaccatagtcaacacttcttgccacataaggacggtctgtttaagctttgagatctagggggaggacaagaggcaggtctgaggccagtgggacctacgtgatcccctcctttttgtcctatagcctaaatatctttggtgtctccatgacttgaaggcaaaaagttcaaacttggccttttcttttaagggttgaaaaagggaggacagaaccaagtcttggagacactggatttgctgcaacacaggaaaatgagatgtgcagggtaaaggatgggaatgaggaggaaaaggggccacttggatttttccaggctaggaggagccatgccgggcagctctgggtcaccagggccactctgcggtcccccgccctgcctccaggccctgtcagacgctgcaagcccagctcagaagcctggcctgggaccaagttcactgcagcaggctgggcccttgcattctgagctgggtgcggatgcgctggtgctctgggaagtcaggggctttgacaactgaaggcaaaggagccgggcacctgagggggtcccgggggagggggtgccgggggaggggatccggcgtcgtcaccctccagtccttgcccacaggtcagggagcccctgccatgggggaaggaggctgtttcttttgtaaactggtggaggcgtgcctcgcccctgggcctgacagcccaaagagacacgcctgagacctctggacagagtacagcagtatgggcgtaggtttctctgcacagtgccttatccatgggcacgggaaaagttatgggatgacagaaaagatgagcaaggaggtctgtggggtggctattttgaatccaccaccggtctaatgtggaggtggtccagtcaattgggcatggggtatggcaatctaaatgccagcaacctttaaggtgccagaaatcccacactctttcccataacaacacctgatttgtttctgacagaaaaggcaggactgggatggccaacccaaatgattgatgagaaatttgacctcctgtgatagaaaatcagtactgaggaccttgaagaagttcttacccagttgtctagggcagtattgatgacctgacatatgaaattttaccaaacaagacaatagaccctggggcatacaaacaattatgacaattttttaatagacagacaaaggaaggggggcccgtgatgggatcagtcagatgcccatctggccactctccctgaggggacttaggctcctcttagcattggcaggctggtataaacccctggcttggatcgagctatgcctgatgctgccttaagccttaagaggtcaccacggaactgcaggtgagggcccattcaaactccgtagctttcaccgtggagctacatactggaaattcaagtgcaagcccttgaactccacattcacgcactcattcacacagagtttataacagttttcttattccctttccaaaacagaggtctccgggagacctgaacgagagaaggagaagagatagagaaagagggagggagggagagagagagagagaaagagagagagagatagagactagtcttaacagagaggcctaacagaaaaccaggactctgtcctccagtgtcctggaacatgggcagagtcaagggagggccatcgtcagggctgcttccctcccagagagacacagaggtgcctaacagaaaaccaggactctgtcctccagcgtcctggaatgtgggcagagtcaaaaagggagggccttgtcagagccgtttccctcccagagaaacagagtcagatctgacttactttcccaggaccagaaactgaggactcaggagttgaatttttgtgggcacacaccagtggtcgatccattcccgtctggaagatagggtcttatggggccctggaacgtcttctggtggtgcctcccctataagtctgctgtctgtccaggggagcctggaatgagtctggctctcacccggtgacaaaaaaatcttgctggggcctccaaatgttgtaactgagctaggtacagagaaatgccacactctgagacgaattcaggagtcctttattagctggtgaccgagagacggctagtgctcaaaattctctcagccccgaagaaggggccagattttcttttatactttggtttagaaaggggagggaggcagtctagtgaaaacaaccttacagaagtaaagcaggcaaaaaagttaaaagaataaatggttataggaaagcaaacagtttcaggtgcagggctttaaatctttcacaaggtgatagacgcggggctttgggtgttatcaaccagatgaattcctaggaactgtggatatagcttgccacagtattttatcagctaattgcatccttggacgtgctgggagtcagcttgcataagttaagtccttgaggaaggggtgggtaaggggctgtaagtgtaggagccaagatggggtctgtctggctctctcagctaagggagagtcaattcaggttaaaacaaggttagctatcacacacatactttgtatcttcttccttgagatcccagtccttcattgcctcttgtccaatgcttgaaaattgtgttactgttttcatatattgcatctggttttcttcttgttgaaagcaagaaaaaattctggtcatttcattagatcatggtctgaggcagaaatcaggctcattcttaatttattaaatggcttataatcaattctattaatatttacttatattctcaagttctccaggaaggataccccaaaaattcatattcacacacgacatgcttcatttcttgattgagccaacaagatctgttcaatcaatcttggctttggaagagctcagagcaaaagttccaagcaaggtcttttatgtttctctggctaaatgaccagaaccagttgtctagacactcatgccaggtaaaggtgtcttagtctgttcaggctgttgtaacaaaaaccataaactgagttgcttatgaacaacagagttttattcctcgtagttctgaaggctgggaagtctaagatccagatgccagaacattcagagtctggtgagggctgctttctggttcctagagggtgtcttctagctgtgtcctcatgtggctgaagggtcaagacagctgtctggggcctcttttataagggcactcatcgcattcatgggacttccaacttggtgacttaatcatctctcaaaggccccacacctttcaaaaccatcatattgatgattagatttcaacacaggaattttggggggatacaaacatttagaccacagcaaaagccattggtagacacaatggcccttggggccatgagggattttagattaaaattttttttttattatacttttaagttctgggatacatgtgcagaacgtgcaggtttgttacatagctatacatgtgccatgggggtttgctgcactcatcaacccaccatctacacattaggtatttctcttatgctatccctcccatagccccccaccccccaacaggccccagtgtgtgatgttccccttcctgtgtccatgtgttctcattgttcaacttcaactcccacttatgagtgagaacatgcggtgtttggttttctgttcttgtgttagtttgctgagaatgatggtttccagcttcatccacgtcccaacaaaggataggaactcatccttttttatggctgcatagtattccatgctgtattatgtgccacattttctttgtccagtctatcattgatgggcatttgggttggttccaagtctttgctattgtgaacagtgccacaataaacatacgtgtgcatgtgtctttatagtagcatgatatataatccattgggtatatacccagtaatgggattgctgggtcaaatggtatttctggttctagatccttgaggaattgccacactgtcttccacaatggttgaactaatttacactcccaccaacagtgtaaaagtgttcctatttctccacatcctctccagcatctattgtttcctgactttttaatgatcatcattctaattggcatgaagcagtatctcattgtggttttgatttgcatttctctaatgaccagtgatgatgagctttttttcatatgtttgttggctgcataaatatcttcttttgagaagtgtctgttcatatccttcacccactttgatggggtttttgtttttttcttgtaaatttgtttaagttctttgtagattctggatattagccctttgtcagatggatagattgcaaaaatttcctaccattctgtaggttgcctgttcactctgatgatagtttattttgctgtgcaggagctctttagtttaattagaacccatttgtctattttggcttttgttgccattgatatgggtgttttagtcatgaagtctttgcacatgcctatgtcttgaatggtattgcctagggtttcttctagggttttcatggttttaggtcttacatttaagtcttgaatccatcttgagttaatttttgtataaggtataaggaaggggtccagtttcagttttctgcatatggctagtcagttttctcaacaccatttattaaatagggaatcctttctctgctgcttgtttttgtcaggtttgtcaaagatcagatggttgtagatgtgtggcattatttctgaggtctctattctgtttcattggtctacatatctgttttggtaccagcaccatgctgttttggttactgtagacttgtagtatagtttgaagtcaggtagcatgatgcctccagctttgttctttttgcttaggattgtcttggctatgcggggtctgttttggttccatatgaaatttaaagtagttttttctaattctgtgatgaaattcaatggtagcttgatggggatagcattgaatctataaataactttgggcagtatggccattttcatgatattgatgcttcctatccatgagcatggaatgtttttccatttgtttgtatccagtcttatttccttgagcagtggtttgtagttctcctcgaaggggtccttcacatcccttgtaagttgtattcctaggtatttgaatctctttgtagcaattgtgaatgggagttcactcgtgatttggctgtctattattggtatataaaatgcttgtgatttttgcacattgattttgtatcctgagactttgctgaagttgcttatcagcttaaggagatttggggctaagatgatgggttttctaaacatacaatcacgtcatctgcaaatagagacaatttgacttcctctttccctaattgaataccatttatttctttctcttgcctgattgccctggccagaacttccaatactatgttgaataggagtggtgagagagggcattcttgtctggtgccagttttcaaaggaaatgcttccagtttttgcccattcagtatgatattggctgtgggtttgtcataaatagctcttgttattttgagatactttccatcaatacctagtttattgagagtttttagcatgaagaggtgttgaattttgtcaaaggccttttctgcatctattgagataatcatgtggtttttgtcattgattctgtttatgtgatggattccatttattgatttatgtatgttgaatcagccttgcatcccagggatgaagctgacttgatcatggtggataagctttttgatgtgctgctggattcggtttgccagtattttatggaggattttcactttgatgttcatcagggctatcggcctgaaattttctttttttgttttccgtctgccaggttttggtgtcaggatgatgctggtctcgtaaaatcagttagagaggattccctctttttctattgtttggaatggtttcagaaggaattgtaccagctcctctttgtacctctggtagaattgggctgtgaatccacctggtcctggacttttttctgttggtaggctattactgcctcaatttcagaacttgttattgatctattcagggattcaacttcttcctggttcagactcgggagggtgtatgtgtccaggaatttatccatttcttctagattttctagtttatttgcatagaggtgttcgtagtattctctgatggtagtttgtatttctgtgggatcagtggtgatatcccctttattattttttattgtgtctatttgattcttttctcttttcttctttattattctggctagtggtctatctattttgttgatcttttcaaaaaaaccagctgctggattcattgattttgtttgaagggttgttcatgtctctatctccttcagttctgctctgatcttagttatttcttgtcttctgctagcttttgaacttgtctgctcttgtttctctagttcttttaattgtgatgttagggtgatgattttagatctttcctgctttctcttgtgggcatttagtgccataaatttcccactaaacactgctttaaatgtgtcccagagattctggtacattgtgtctttgttctcattggtttcaaataacttatttatttctgccttcatttcattatttacccagtagtcagtcattcaggagcaggttgttcagtttccatgtagtggtgcagttttgaatgagtttcttaatcctaagttctaatttgattgcactgtggtctgagagacggtttgttatgatttccattcctttgcatttgctgaggagtgttttacttccaattatgtggtcagttttagaataagtgcaatgtggtgctaagaagaatgtatattctgttgatttggggtggagagttctgtagatgtctattaggtctgcttgatccagagctgagttcaagtcctgtatattctttttaattttttgtcttgttgatttgtctaatattgacagtggggtgttaaagtgtcccactattattgtgtgggagtctaagtctctgtaggtctctaaaaacttgctttatgaatctgggtgctcctgtattgggtgcatatatatttaggatagttttctcttcttgttgaattgatccctttaccattatgtaatgcccttctttgtctcttttgatctttgttggcttaaagtctattttgtcagagactaggattgcagcacctgcgttattattattattattattattattattttgctttccattttcttggtaagtattcctccatccctttattttgagcctatatgtgtctttacatgtgagttgagtctcctgagtacagcacaccaatgggttttgactctttatccaatttgccagtctgtgtcttttaattggggcatttaacccatttacatttaaggttaatattgttatgtgggaatttgatcctgtcattatgatgctagctggttattttgcacattagttgatgcagtttcttcatagtaacaatggtctttacaatttggcatgtttttgcagttgctggtaccaattgttcctttccccatttagtgcttccttcaggagatcttgtaaggcaggtctggtggtgaaaaacctctccgcattttcttttctgttaaggattttatttctcctttgctatgaagcttagtttggctggctatgaaatcctgggttgaaaattcttttctttaagaatgttgaatattggcccccactctcttctggcttgtagggtttctgcagagagatccactgttagtctgatgggtttccctttgtgggtaacctgacttttctctctggctgcccctaacatttttttccttcatttcaaccttggtgaatctgatgattatgtgtcttggggttgctcttctcaaggagtatctttgtggtgttctatgtatttccttaatttgaatgttggcctgtcttgctaggttggggaagttctcctggataatatcctgaagagtgttttccaagttggttccattctcctcgtcactttcaggtacaccaaacaaacgtaggtttggtctttttacgtagtcccatatttcttggaggctttgttcattccttttcattcttttttctctaatcttgtcttcatgctttatttcattaagttgatcttcagtctctgatatcctttcttctgcttgatcaatttggctattgatacttgtgtatacttcatgaaatacttgtgctgtgtttttcagctccatcaggttatttatgttcttctctaaactggttattctagttagcaattcatctaagctttttttcaaggttcttatcttccttgcattgggttagaacatgctcctttagctcagaggagtttgttattacccactttctgaagcctacctctgtcaattcatcaaactaattctctgtccagttttgtttctttgctggtgaggagttgtgatcctttggaggagaagaggtgttctggtgtttggaattttcagcctttttgtgctggtttctccccatcttcgtggatttatctacctttggcctttgatgttgttaacattcagatggggttttggtgtggacttcctttttgttcatgttgatacaattcctttctgtttgttagttttccttctaatgggcacctctgctgcaggtctgctggagtttgctggaggtccacttcagaccctgtttacctgggtatcaccagcagaggctgcagaacagcacagattgctgcctgttcattcctcatgaagcgtcatcccagatgggtacccaccagatgccagctggagctctcctgtatgaggtgtctgttggccccttctgggagttgtctcccagtcagaaggcatgggggtcagggaccgacttgaggaggcagtctctcgcttagcagagttcgagtgctgtgctgggagatctgctactctcttcagatctggcaggcaggaatgtttaagtctgctgaagctgtgcccaaagctgccccttcgcccagatgctctgtcccagggagatgggagttttatctataagcccctgactggggctgctgcctttctttcagagatgccctgcccagagaggaggcatctagagaggcagtctggctacagcgggtttgcagagctgtggtgggctctgcccagtttgaacttcccagtggctttgtttatgttgtgaggggaaaactgcctactcaagcctcagtaatggtggacaccccttcctgcaccaagctttagtgtcccaggttgacttcagactgctgtgctggcagcgagaatttcaagccagtgaatcttagctcactgggctccatgcagatgggatccactgaactagaccacttggctccctggcttcagtcccctttccaggggagtgaacagttctgtcttgctggcattccaggtgccactggggtatgaaaagaaactcctgcagctagctcggtgtctgcccaaatggctgcccagttttgtgcttgaaacccagggccctggtggtgtaggcaccagagggaatctcctgatctgtgggttgtgatgactgtgggaaaagcatagtatctgggctggaatgcaccattcctcatagcacagtccctcatggattctcttggctaggggagagagttcctcaatcccttgtgcttccctgttgaggcaacaccccatcctgcttctgctcaccctccatgggctgcagccactgtctaaccagtcccaatgaaatgagccaggtacctcagttggaaatgcagaaatcacctgccttctgtgttgatctcactgggagctgcagaccggagctcttcctattccatcattttgccagccacccttcaggattttagattttaaagagctcttcatgaatctcactagtttattttaccaaacattaaagatggatacccaggaatctccagagataagactagagcggtgctgggccagtatcatattacacaacagcacagcatacaaaaagaattgtggggccaggtgcagtggctcatgcctgtaatcccagcactttgggaggctgaggcaggcagatcacctgaggtcaggagtttgagaccagcctggccaacatggagaaaccctgtctctactaaaaatacaaaaattagccaggggtggtggcgtgtgcctctaatcccagctacttgggaggctgagacatcagaattgcttggacccaggaggtggaggttgcagtgagccaagatcctaccattgcattccagcctgggcaagactccatccaaaccaaaaaagaattgtggatgctgctaaatttgtagattaaaattcctatctcaggaaagaaatgtgtcaaatcaatgacagattcaacctaaaaaacttcaaaaaggacaactgaaactcaaaataagaaggaaataataaagatcagcaagaaattaatgatatggaaagcaaaataacaatggagaaaaaccagtgaaatcaataactgattttttgaaaagatcaataaaagagatccacctttgtggatctagcatgaaataatgtgagaaaacacaaattatcaatgttaggtacaggtgaggtgacatcactagatactatagattttatttattcatttatttttacaccccacctggagtgcagtggcacgaccatggctcactgcatcctggaactcctgggctaaatcaatccactggcttcagcctccagagtagttgggcctacaggagtgggccaccacacccagtttttatagattctaaaagggtaataaggaataatatgaataatcttattccaataaatttcacagtggccagtttgaaaacaaacaaataaaattgaacttatttttgacaacattgttgcaggaagtcagggatcctgaacagagggactggctggagccacagcagaggaccataaattgtgaagatttcattttaatatggatataaatcagatcccaaataatacttttataatttcttatgcctgtctttactgcaatcttggaacataaattgtgaagatttcatggacatttatcagttcccaaataatactcttataatttcttatgcctgtctttactttaatctcttaatcctgttatctttgtaagctgagaatgtatgtcacctcaggaccactattgtacaaattgattgtaaaacatgtgtgtttgaacaatatgaaatcagtgcatcttgaaaaagaacagaataacagtgattttagggaacaagggaggacaaccataaggtatgagtgcctgcggggtctggcaaaaagagccatatttttcttcttgcagagagcctacaaacagacatgcaagtagggaagatatcactgaattcttttcctagcaaggaatattaataattaagaccctgggaaaagaattgcattcctggggggtggtctataaatggccgctctgggagtgtctgtcttatgcggttcagataaggactgaaatacgccctgtctcctgcagtatgctcaggctcactagggggggaaaaaccccaccctggtgaatttgaggttagacgggctctctgccctcgaaccctgttttctgttgtttaagatgtttattaaaacaatacgtgcacagctgaacatagaccttcatcagtaattctaattttgccctttgccttgtgatctttgctttgccctttgccttggatctttattgacctcagaagcatgtgatctttgtgacctactccctgttcatacaccccttcccctttcgaagtccttaataaaaacctgctggttttgtggctcaggtggtcatcacggtcctaccattatgtgatgtcactcctggaggcccagctgtaaaattcctctctttgtactctctctctttatttctcagaccggccaacacttagggaaaatagaaagaacctatgttgaaatattgggggcaggttcccctgatacaatataaatattaatggagaaaatctcatggaatctgtgaacaaaaatgtagaataaatgaaattatagtttccagggtagacaatgatttttataaaaattatacttctatgtacagtttgaaactgaaatttaaaagagtactttttttttgagaaggaatttcactcttgttgcctaagctggagtgcaatggcatgatctcggctcactgcaacctccacctcccagttcaagtgattctcctgcctcagcctcccgagtagctgggattacaggctcacgccaccatgcttgggtaattttttgtatttttagtagaaatggggtttatccatgttagccagcctggtctcgaactcctgaccttggtgatccgcccacctcagcttcccaaagtgctggctttttacgagagcatacgatatatacttgagacatatatataagatgtgcaactgaaatacatataagatgtacactataaactacaaaatattgtggaagaaaattaaagatctaaataaagggagagatataccacatttatggattagagcacaaaggcttccctttgtgggtaaactgacaatgttttaaacccattaatgttttaattcttttcaaattggtgtgtgtgtgtatatatatatatatatatttatttattcaatgcagccgggcacggtggctcatgcctgtaatcccagcactttgggaggcagaggcgggtgggtcacaaggtcaggagattgagaccatcctggctaacatggtgaaaccccgtctctattaaaaaatacaaaaaattagccgggtgtggtggtgggcgtcggtagttccagctactctggaggctgaggcaggagagtggcatgaacccaggaggtggagcttgcagtgagccgagatcatgccactgcactccagcctgggtgaaagagcgagactgtgtctcaaaaaaaaaaagaaaagaaaaaatatatatatatattcaatgcaatctcaatcaaaatcccatgatgcttatattagaaaataacaagtgaattctaaaatttatatggtaatgcataaagtaaggacttagaatagcaaaaaaattgaaaaagatgcataaagttaaagaattatattgcctgatttgtagacgtattatttaattatgttaagtagactttaaaatattagcaaaaatatagattaagaaagtccaggaatagaccaacacatctaagatcaaatgatattttagaaaggtgcaaaggcaattcagtgaagattgtgttttcaacaagtgttgttggaacaactggacatccatattaaaacaaaacccaagaaacaaaaccacaagctgtgaccccaaacctcacatggtatataatattcaagaactaactcaaaatggattataaacctgaaagtatgaaaccttcattaagtaacatgagagaattttttaaatcttggcaaatacttctgaaatatgcaccaaaaacatgttcaatctaaggaaaaatgacatgttcaactttgtcatcagtaaaaatttctgctctagaacagactctgttaagatgaaggagaaaatgaaccttaggctagaagactatactggcaaatcacatatctacagaaagacttgcatccaatatttactaaaaactctcaaaactcaataataaaacaaaaaagtttaaatgggcaaaagatttgaacagacagttaaccaaagaagatagagggatggcagtagtacaaataaaaattgtaaacattagtcattagggagatacaaagtaaaatcacagagaaataccactacacaccaagtgggaatggtgaaaattgaagactctctataccaagtgttggtgaagatatggagtacctgaaatcctcataacactgtggagggcatgtaatgtagtataaccactttgaaacacaatttgtcagtttgtaaaaaggtaaacatccacttaccctgtgacttggtgtgcttatgctttttattttctgcgttttatgatgacatcttttaaagtttactggctctggagagactgccctcccaggattagtcttttcttagagatggcaaagcgcttgacccagagcacctctctcatatacaaccaactgatcctgagtctacagccccaattacctctttatccaactctcacacccccatgccaatatctcccctgcactgaagcaccccacgaccaggtaccaggtaaccagagaccaacactataggccaaagcctgccggagttattcaaattagctaaccataagctgtttactctgccctgcctggcctgtcccatgaaaactccaataaaggctgttgcctatgccttccccttgctcctgcctcctgatcaacactggtgctctccatgtggccctgtgtggcatggtgtgcccctaggaaatgtaagtaataattgctttccattgcattggcctctctttgtggtcactcagtcaccaccttaagttaaaatcccacaggtagaaatgagacacatttcttcgtgtgtccgtgtgtgtgtgtgtgtgtgtgtatgtgtgtgtgtaagtgggggcagggcacgtctgcagagagacccacggccctgggccatgcctttgggtgacagtgtatcagaaactaagctcagcatgcagtgggatgggttgggtgttgctgtgacatcctctgtcctccctggagcaccgtgggattgggagcaggctgagcactgtggcgccagcccgcaggtccatgtgtgcatgtgcacccaggaggccctgaggcatgaccgtgtgtcttggcaaacatgtgtctgcacttggctcgccctagcacagaatctgccaccgagtgccggttcaacaaacatttgataagtgagtttgtttgtctgaatgggtagcagattaggtgcagctttcgagaaaattagtaaattgtagtttagattcaaggaacattacctggaataaaacgcagaacctaaaggatgtgaggtatagaaagtgcgttaggatcacatgttacacagtgaaaaggtcctacatatgtgggtgttgaagccacttgcctgtgacttctgtcacctgactggaccctgattgaccctgggtgaccaggggcaaaatcagcagaggggcgcagctgggggtgcttgctggcctggccactcaccgagctgtgagcagcaggggaagctccacccagggccctagtgagtatgggtgtggggggaggggcacgtgggtggccctgatcagtgtcagggtgagctccccccatcccaccttcctgttacctgtggagggtgtccagtttcttgccgttttgaagcaagaattggaaaaaaaaaaaaaaaccgcacaaacagagcaaggaaagaatgaagcaacaaaagcagagatttactgaaaatgaaagtatactccacgtgatgagagaaagaatgaagcaacaaaagcaaagatttattgaaaacaaaaatacacactacatggtcgggcacggtggctcacgcctgtaatcccagtacattgggaggttgaggagggcagatcacttgagatcaggagttagagaccagcctggccaacatggtgaaaccccatgtctactaaaagtacaaaaactagccgggcgtggtggcacacgcctgtaatcccagctacttgggagactgaggcacgagaatcgcttgaacccagtctgcactccagcctgggcgacagagtgaggactccgtctcaaaaacaaaacaaaacaaaacaaaacaaaacaaaacaaaacaaaacaaaacaaaacaaaacactccacatgatggaagcaggctgctgggagcaggcccgagtataggggcccccaggttacagaattttctggggtttgaataccctctagaggtttcccattggttacttggtgtccatcctatgtaaatgatgcagtggcccacaatcagtctgatcggttgcagaaagcaaacagaggctgaggtgaaattacaaaagttacaccctatgcaagcatctgattggttgtggcaagcaattggttgttttctgcaaccaatcagatactttcaattttccatctgccacacagaaaaaggggaagtaggcttgcaaagggagtagtctctggtccttttcttacttaggtttgaaaaattgttttctgtttgatttagttctaggaagtcagagtgaatcggccttaggttccgtgcctccagaccctgttctcctgcctcattcctaccaagctgctccctgcaggggcctgatgccctcagggaagattctatgtattcactgtctggggctgctcaagccactgctctgcgcagccctgcctcccactggccttctcaatggctttccgctcagggaacccctgcagcctgtagtctccaggcaggccttgggccaccaggctggagagagccgcggccacactcagcggtgcaaggtgacccggctgtcttcctggcaggtcctcgtgggagcggctgtcccttgttcaggggcccgggaccgcgtccccgtcccccgacatgtcccccaagcatgccttcagggcagggtgcagactggaaggctggactggcggggacacgcgtgttctgcatctcctaacgctgtgcccactgtgggtgggacggtgactggcttgggtggggtccaaggcgggggtgacgaatgacacccttggagagggggcctgcaaagggcactgtctgtggccacgtggttactgtgggatttggccttggggaatctgatggatgttgacagccagttcctgcctcttttcctcttctggagcccccttgctagcaccgcgaaaaaccccgcacagctccagccgcggggctcgctcaggagcggccgcgaggggacacccaggttgcgctgcaggaaagcccttgtctgagcagggcacggggctccacgacaaaaggacacgatttgacttaaattatgtttttcccttgatgatattttcattttctttaaaaggatgtagttttcttggaccgtggaccaagcttatttcttaaacagattccagcaaactcacaagtgtccttcagctctaggcctgctgtgtgtgtgtgtgtgtgtgtgtgtgtgtgtgtgtgtgtgtgtatgtgtgtgaatgtctggggccaaggccagggatgactgggctgtggtgagaacctgacccttcccagtcttccctgatttctcttgttcctgcagctacctagtttggggatggatggggaaggaggccccaggatgagtcctcacgtctctgcatcccactgggggctgcgtacaaatggatgaggaccccccccttgaaaggctcctgggtggtgtaggccctggatgggagagttggggggtagagctggatgtgggatctagatcagggatgcttggggcttttgatgccctgatatgggattgaggagggggcatggtcaatgctgaatgggtgtgaacagatgactggggatggggagcaagggagattctggtgggggaagcacgggaaggttgaggtcagagctggggaagctgaattccaggttgaggagaaggaggtgtggtcgcagattgcagggaacccagaggacttgagcagggaaccctctggccaggtgggtgtggcagttgacattggagttggggtgggggtggagtcgggggtggagctgcagatggcaggggcagtgttgaaggtggagggtgacggttgaggcagggaaggggcagtggggtggggataccccatcaggttgtcccatgcctctctgagagatgcctgcccttccacccgcccttctggggtcagtccctcccacttcccccttggctgaagaacacacacagaagctggatggatgcaggtgagtttattaggcagcattgtcccgcaggggacaggcctgggtggggaggtggggggcagccgttcccaggcttgccccaatcagcacagcaggagagagagtagaggcagcagcagggcgggagctagggagggtggggccctgggcccagattctcatggttgggacaggcagcctggacaggaacccgaggtgcctatggatggtgttacttcagtatcgtgtcggcacactggttgttgatttcttcctgtggggaggggtgggaggccgaagggaggggtcttctggggaaggagggataggatggggttgattgcggaggctgagcatcagagcgcggaggtccagcgccctgaggtcttgtccctgggcagctgcccgtgtgagaggtggttgcttggtgagaggtggggaggtatttgggtggagagagaggctctcagggaacagagtccctgctctcaaaggaggtcaagggctgtggggtggcgctggtggccgggccctgctgcactcaccagttgctgcacgacggcctctgtctcctcgggggtcattgtgtcggtcacgcagtccttgagtttagaggatgtgtttctttccggctccgtgaggtggtatctgttgacagtgtccatgtaggtgtccttgtccttggtcagaaactggttaatgaccgtcataagctgcgggcagagtttcctgggctctgcggggagagtaggagcgtgtgatcagggaggggtgggtgccccggggctgcagcgcggcccgggcttccctggcggggcctacctgcgagcagcggcagcagcaggagacccagcagcgccagggctcgggcggacgccacgcggttcggggtcggggccggtaggtatgcgggtcacactggggcagtgcggacgcaggtccctctggcatctcgggagacgcggtccttaaactccgtgtcctgggggcgggcccgggtggcgtggcttggctggacagggagggtaggggcggtagtggggtttgtggcactccagcgtagcaggttgcatctgcgggtccccgcccctgccccgcccccagcccctcccatggtgctggatccaggcagctgatgtgcaggcggggacccctggctgggcgcggtcctgggcgcgtccctgcgcggttcaggcttccatgcgcgctgagactccgctggctctgtggcctgccccgtcgtgtgtgcgtcacgaggcttgggtgcacgcgtttgagaatgggatatgtgtgtgtgagtggaatgcgctggtgggagcgtgtggggtgtgtgtgtgtggcacctgaggttggggtgttgactgtgtggggtgggggtctgtgattatatgaatatgagggtgtgattgcggctgggacagggcatgtggctgcctctgcctctgcatctgagagagacaagaagtgatgggagagtcttgtgtgggggccctgcggggcagggacaggggacccttcttcactttatgccatctggaggtgaaaagccagctaagtagcaggcttcatcctggagacagaggctgggagactgcagctgaaaggtgtgggttccgggagggctgcagggggctgagcagcagcgtcagggagcagagggccgccctccctccatcttccttccttctctggaccccagagcactgtgtccccctcccacccctacagctgcaggtggagccagctggaggggtctttagaaggaagggggtcctctgagggcagagagggccaggaggctccctgaggacctgaggcccctctgggcctcccagggctgggcctgtggtctgatctgctttgccctgggagagacgtgctcagtggtggggtttgtgtagctgtcactcagtcacctgcctgtgcccagccacacacctgtgactcccatgggccccacccaatacacatgtgggtcttcaagtgccgtgaggggaagttcctgcctgtgtcacatgcatccatcccacccaccacactgcaggttacaggactgccccacaagcgccaccatgccagcctgacgttacctggcacacaggtatcctcacctgcatgacatgatcagatcatgcactttctatgccagggccagtgccagggcaagcttgtatcttcagctttggggacactgtggggcgggtggtggctggaggccagggaagtcaccaggctggagagggttgatgtcagacatctcccgtgcaccactttgagccacctcagcctcacctgggactctggctggcactgggactagcagttccatgaaggtttagagcatctctaggcttaggaagggcctcccttgtcatcactgtggtccgggctgcatgccttgtgaccaagggctctggacagcagatgcagccagccagagtgtgggggtgaggggcctgggcacaggagggatgggaggccttccctgcacccccatggccaccatttcagagggaggacagcaattatttgggtttgtcctgtgagcggtggcagagagaaggccccagggcaggtctagggccagacaggcaccctctgctgcagcctcggggccaccaggcacgtgatggggccggtgtggggatgtcccctggccaaacacatgggtagggggtgctctggggtcagtgggtgggtccgggcgtttgcaagagccatgttaagatagacagtcctgaaggatggagggagggggcagaggggtcagagaatggatggatgggggagacggctcctgccgcttcctggcctctaagtgggggtgatgggtggtaggtgagtgcagtgggagctgcaaggctgagccagggaagtggaggcagcagagatgcagaccttgcctgaggctgactcgggactggggcttcttagaggccagggccctagagctcctggacagggagtttgcaggaacagtgatgcagcatacaacacagcacaactcgacacaacacaatctgccacagcagagcagcgtgcggtgcactgggctgcagcagagcatggcccagggtccagggagtcatgtaggctccagggaatcatggagcaaactgacctgagccgcatccctcagccaaggcacaggcccccagccttgagccacccacttccttgggacagctggatgccctagtgtccctggggctgaggatggggctggggctgctgtccaaggtgaggtctgactctaatcccctgtctctaatccccagtcgtttggggaacttgggcgtcttccaggggacccagtggtgctgatgggatttctgggcacctcagccaggtcccctgcccacctcgccacactggttcccactgcaatctggctttggggcctgtgtggcctctgcttactgagccctgtggttccctgccaggcaccgttggccctccggccaggctggcacctggagaatggcctgtccccaaatcctgcactcttcccagctcacctgctttgcttttctcccgcactgggaggtgggagccaggttgacactggaggaggagctccctcaactgtggcttcaccttagggttctgggcagggttttgggcagtgagactttctggataggggctggaggtcaacagccttctgagtggggagtggtctcatagcagagagacccacggtggaggggtggggtgggcagggaggacgacccggctgtggaggagctggggcaggcaggttacacggatgcagttcacactccctccttctccccatcctctcccacaccccccgcgtcctctcctgtctcttcctccctgccctgttctgtccctctttcccctctgtgtctccatcttcctgtccctttttccttattcatttgtcctcctcttcactttccatttctccctttccctcctcccctcacctctcatctttctattatgacatatgacacaaatacagactaggacacaccatataaacgtatcttaggtgatgactgtgacgcaaacctcacaatacccctgcagttcaagaaaggtcatggtgagcccctcccggcaccagcctcactgcctagagttgacccctgtcctgagtttgtggtttcttgttgttttagtggacggttttgctacctaaacatcttcacatataataagtgttaattttactcttttacagtttttataaccgtggtcaccatgtgtgtgttctcccatatcttacttttttgttcaagatttttgttggtatcaatccacattgctctctttatggtttaaaagcatcgaccattgtgtactgattctattatcgtgaacagcactacagggagcttttatgtgtggatgtcctggcacacatttacattcacatttgtatgggtttgtgcccatgtgtggaattttagatgataaggcattcatattcttgactgtcttaggtaacaggaaaccttgaaagcagttatacaatgcacacgctcagccacactgtagtatttcctgccactctagatcgccataggctggtatcgtcagtgtcgagtgaaccatctggtaggcaggtgtcaggggcatctcattgggttcccatttgcattttctggtgtaaggaggttgaggcctctttatgtgtttattggtcatttagtgaagtgtgagtagagggcttttttcccgtttatatattgcatgttcatttcttttttccatctctggtcatttgtaggagttttttgtatatatatatatattttttttttggagacagggtttctctctgctgcccaggctggagagcactggcatgatctcagttcactgcagcctcaacctcctgagctcaagtgatctttctgcctcagcctcctgagtatctggtactacaggcgcatgccaccacacgtggcttatttttgcatttttagtagaaatggggtttcgccatgttgtccaggctggtctcgaactcctgagctcaggtgattcacccgcctcgacctcccaatgtgaggagttcttgctatcttctttttttgtttttgagatggaatttcactcttgttgcccaggccggagtggaatggcgtgatctcggctcactgcaacttctgcctcctgggttcaagctattctcctgcctcagcttcccgagtcgctgggattacaagcacccaccaccaggcccagctaaattttgtatttttagtagaggtagggtttcaccatgttggccagggtggtgttgaactcctaacctcaggtgatccacgcgcctcagccttccaaagtgctgggattacaggcgtgagccaccactcccggccagtattttcttgataagagcccttgtttggttatttatttaaaatgccttctgcaacactggggattattagctttgtattcccttgacggtttttattgaacagaagtataaggcttactgtaatgaaatttatcaacgcttcctttctgcttgatgttgtgtgtgtgtgttttgcttaataaatagtcttatctttttatttttatttcttaatgtggttttattgctttggaaaaaagattctcatctcatggtcataaagatattcttctacataaatacttgtgaagtctttattcttttgccttgtccattgaggtctctaaggtacatggaattgacttttgtgtgaaatgtgggtaacagtcctcttacttttaaattatatagattccctgctgtcccagtactgtttaggacaggagtgtgtaatgttttggcttccctgggccacactggaagaaggattgttttgggtcacacataaaatacactaacactaacaatacctaatgaactaaaaaaacttaaaatcgcaaaaatctcataatgttttaagaaagtttacaaatttgtgttgggccgcattgaaagccaccctgggccgcaagcatcctgcgggctgcagattggacaaatttggttttggagaagatggcccttattccattattctcaatgtccctttgtcaaaaagcaagtgccccatagagggacatagtttgcttctgagttctctatttcatgtcgctggtctgtttgtctgtatgccaatgtggcactatgttgagtacacactaaagctttagttcttgactctggcagagggggtccttccgctttggccttgttcctggagtgtctttgctgtttttgaccctctgcggtgccagacgtttagaaacagctatttgaattcaatgtgggagagaactgaagttttgatgacatcgagtattcctctccataatgctgggatatgttgccgtttattttgattctccctattttctctcaataattttttacatatatatttctatggtgctcttatacatgtattaattgattgattccaaggcatctgttctttttaatgccattgtaaatgttacattcttttaaagtgtaggtttataaatgtttgtgttgctatatagaaaattttaattattctatattattttgtatttaggattcgaagactctttagtattttctctgtagattctttaagattatttatataaatatatcaacgtgtatttgtttcttcctcttcaatattcatatattttacttgtcttgctttattgcatttgtagaatctctagtgcaatgttggatagcaatggtgaaaacaggctttttgtttagtatctaaactcaagaggaacttttttgtttgttttgctcttgacagcattgtattttatataaattgttaaatttcacgtaattttaggcttataagaaagttacacaacattatatataaatatttctggatacccttcatccagattcaagaggatagcttttgatattttatcattaaataggaagtttaacgtaagatatttttggtagatgttctttgctagattaaagatatatcattctatttctattttttaaggggatttttaaatcttttttgagacagggtcttgctttgtcacctgggttggagtgcagtggtgtggtcttggctcactgcagcctcaacttcctggactcctcccacctcagcctcccaagtagctgggactacaggtgggtgccaccacacctggctaatttttgtaatttttttagagacagagttttaccctgttgcccaatgtggtctcaaactactggctcaagtgatctgcccaccttggcctcctaacatgctgcaatgacaggtatgagccactgcatcctgcgtcagataattttttaaatcgagaaaagatgaatgttatagcacatctcacttgcatttaatgaactgtgtgtacagtttttttccccttagttctgtgaaagtgttacatcaaataattttctaatttgaaagctaccttgcatttctggtgtaaatcctcctttatcagcatacactattcttaaatgtaatttattccactttgccaataccttgcatggtacattttgtctatgtccttgagtggttaaattttggtgtcaggatgataccagctcattatgaattggggatgtagtggtaatttctatttattccaacagatctagtcttcttctttccccagtctgctttgtaccccagaacatggccttttgtggactgcatcattgggctacattgccctttggtttttgtgggtcaacacattggagatatagcagggcactgaaggaaagaggagagtgagatgaggggactcactcccagttgccctccttcaggactacaggttggccatggctgcgttcctatcctggtggccgaaggtcctgggagctcgctctctcctacagttacaggtctcactggattgtagcaaagcttcttttccttgcctcccattagatattttgctcttgcttgccttgggcattttgttattggtttccctttactttgctcacagcagagccataagcctgtgaacccaggggtgtctgagacaggtctcaatcaatttgaaagtttattttgccaaggctagggatgtgtctatgacacagcttcaggaggtcctgaggacatgtgcccaaggtggtcaggatacagcttgcttccatacattttagggagacataatacatcaatcaatgcatgtaagatttacattgcttcgatctggaagagcagaacaacttgaagtggggatgggggggcttccaggtagtaggtagatttaaaaattttctgattggcagttggttcaaagagtgaaccaatagaaaagaatgtctgggttgtgataagggattgtggagaccaaggtttttatcatgcagatgaagcctccaggtagcaggcttcagagagaatagattgtaaatatttcttatcagacttaaggtctgtgttgatgttaaatcctggtcagcttttcctgaattccaaaagagagataggtataatgaggcatatctgacccctccttccattatgacctgaactagttttttaggttaactttgaatgcccttggtcaagagaagggttccattcagatagttgcgggccttagaattttattttttgtttatagtcattcattaaactcttgtcatgtatcctgtgtgagtgtgccatttccttcctgcagggacattgagtggtacagggaatgcaccctcattatttatgctttggaagaatttgtataagattggagtggtgtaagcgcccgacgggttcttcccgcctgctccacaaacaaaatcaattcacagagaccataacattgcagtaaagaaagagtttaattgatgggaggctggccatgccatgtaggagacagagttatcatcaaaatgatctcattgaaggctcagaagctatgggattttcaaagatgcttggtgggcaggggacttggttatatggagtggtgagggcttgggttgaagacgaaagaatagggagtcaaagctgtctttttgcatggagtcacttctggatggggccacaggagtggctaatggatccaggtggagccatcagtgttagacacacaaagaaaacctgaaaagacatctccaaaagccaatctcaggttctaccatagtgatggtatctgcagaagtaactggggaagttgcatatctgtgaaatccagaataattggtggcaattatttcatatgtttattaaagttgttattttgttttaatagctttattgaagtatagttgacatataacaattacatatacctaaagtgtatagtttataatttttgtttatgtctataccttggccaaattaagagggaccatcaggcactatcctcctagcttgatggtctctcattagctttataaacacagttgagttttggggaagggctattatcattttaattataaagtaaatgtctctttttaatgttcttctcttcattaatctattaagttgattctaattgtactttaaaatcttgtatgtttattaaattaaattattttgttttaatatcttttaataaagtataattgacatataacaaatatgtatatctgaagtacataatttgtgacttttgacagttgcaaaaatcagaaccaccataatgatcaaaataatgaacacatccctcacttccaaatgcctccttgttcctctgtgtaacaccctctcctgcatctccttaatcccttcctcctctctaggcaaccgctgatcagctttatgtcagtatagattaatttgcttcatgtaaattcaatcatacagtatggaatgttattatttcttcagagagtgttgtccttctggttcatctgtgtcatgtgtatgaatagtttataccttttttgaatgttaaatttaaaaaactacatacggtgatactcactatttttgatgtacgtttatttccatgagttttgacagctgtgccttctgcaggttttgtattgatgtctggaatctcaagcactaccaccacaatagagatgccattttcttactttcaaatattccttgtgctgtgcttttgtagtgaaatattctccttgtcctcaattctgagcagccactggttcattctttattctgataccattgcgttttctagaactgcttatcatgaagtcacgcaatatgtagctttgttgttgttgttgttgttgttctttgagacggagtttcactcttgttgcccagcctggagtgcaatgacgtgctctcggctcaccgcaatctctgcctcccaggttcaagcgattctcctgtctcagcctcccgagtagctgggattacaggcatgtgctaccatgtctggctaattttttgtatttttagtcgagatggggttctccatgttggtcaggctggtctggaactcgtgacctcagatgatccacctgcctcggcctcccaaagtgttgggattacaggtgtgagccaccacacccggcaatatgtagtttttttgagtctcgcatcttttaataatttgatcatttacaaattctaattatgatcttacatttttaaaggtatcaagtgtcattacactttcttgatttctttcttttctagtttattgttgatgttcaggaatggtactgattttagtatgttgattttatatcctgcacctttaatgaatttattgatcagttctgagagttttttggtggtgcttttggggttttctgttcataagatcatgtcctctgcaagcagagacaatttgacatcctcctttccagtctggatgccctttgtttctttttcttgcctaattgctctggctaggactttcattactacattgaataaaagtggcaaaaatggacattcttgccttgttccagatcttggaggaacagctttgtacttttccctattcactatgatgtgaataggctgtgggcttgccatacatcgatttattgtgttgggctacattccttctatactcagtttgttaagagtttttaccatgaaggactgttgaattttatcgtgctttttctgcacctatcgagatgttcatatggttcttgtactcattctgttgatgtgatgtgtcttatttgtggatctgtgtgtcaggaaccatccttgcatccctgggttgaattccacttggcataggaatgatcactttgatgtgctgcttcatttgtttggccagtattttggggaggatgtttgcatccacgtttatcagtgatattggcctatagttttctttgttgttgtgtccttccctgagtttgatatccggataatggtggccttgtaaactgaatttggaagaattctatactcttcaattttctggaagagtttgagaagaattgctattaattcctcctaaatatttggcggaattctgcagtgaagccattggagtctggaattttctttgataggagacattttattacagattcaatttgtcacttgtaattggtctgttcaaaagtttgatttcttttcagttcaatcttggaaggttgtatttttccaggaatttatacatttctgctaggttttcaaattggtggttgtattgttgttcatgacagcctctaatgagagaaaatctaatcatgaaaattcacccctagctgaggcccacttccttcctcagtgatgtggccgtcacccaggccacaggtccgcataccagtgtgagtcaggccgggccaggtgggcgggaggcttggccgagtggcaccaggaaatgcttcttattgctattgactcggcttgaagatccctaacctgcataggtttttggaattaaaacagaaaggtaaatgtcaggcctggtgagtttccagacctctggcatgctcagccccagggcttgccaccccacaggggtcggatgctccatctcccgctccagtccctctctcactagactttctgctgatgtcctgtgcactcaaccaacatgacccagtgtctagtgaagtcacgcagagcccatgcaggagacacacagggcattggtgacttggtcacactcctcagggcacatatggggtgaccgatggatggaggagaaggaaatgggggtgctaagagttcactcttgacttggagaaggagacctggagaaggtcaagtgttggaaccaccctggcagaggtcagagacaaaaagaaacctgagagatggggcccagcaaagtggaaagctggggtgtacagagggagggtggaggatcaggtctcaaggtcagcaggctgggtcctgcctattgtgtgttctggcactgggtatggactctgtgctgagagatatgggtaggtgtctggggtgtgtggtgacgtgatgagacctggactgtaagaggtcacctctgcattctgggcaatgacttaggggttggagggaggctatgggaaggtcaacacttagacgtactgcccacctaagactggagtgaccttgtgaggtggctctgaagggtgtgggaggctgacttcaggcaggagaggtaaatgggactgagctaaagggaggtgtggggagcactggtcagggcagagaggatggctcaacggcctgtcttctaccagggagtggctcagagccagggcaggaggccagctctgagttggtgggagcctggcagaggttttgctcaggagtcctgggaggcccctggacctgagtgacaggtctgaggggtctcacttgcacttaaggcattaaaatgtccctgtgccttttgtatcctattagtaggtcaaggaacccagcagcaaggtggacttaggcctccaggggctctggctgtcatgggtgaggggagatgaacagagttggaggctgcagggaggagtggagggggagctggcaggatgggccagggttccccacacaggctcagtggagaagggcttgtcatcatggtgaccctttgtgctgcagcctagggggtgagacctacagtcatggaccagatcccagggcagtgtggatgatggaggaggagggtgagttcaaggcaggtgtggggacagaagatgtgggcctccaatgacctgcacagggcctgcattttatcctgaggaaggaggatcaggagcccccgagggcttttcctggagccgcaggtgctgccatggagtgcagggaaggtcactctggcagctgtggggatggcctggagcccagggagttggtcctagaggaaggaggcagctgccataatccaggtcagagtcaacaaggacataaaaccacctgctcattgtttactcatttcttcatcacaagttctctgagtatgtccttggatccaaggcctgggaaaccaggaatgtgggtatgaccccatttcaaccttgagaatggctttgaagcctattgtccctagaccacacctgaggatgttacctggcccacttttctcacattacacaggagaggactgaagacagaaggggtatggtttccacctccaaggtcctgcacagcccaaggacacagggcctggaggaggtcccaggtgtcctcatgtcgtgacctgacctctctcaaatggaacatggatctcagctatgattctattttccatccatccatgcactcatcatccatccatccatccatccatccgttcatccatccatccattcatccattcatccatccatccatcatctatccatagatgcatctatccacctatccatccaacaatccatctgtccagctatccatctatccttccattcttttatctgtttcagagacagcacttcctacatttgggcagcaagactcttgttgaagaggatgtggatgaggcatttctgtgggtgccggagaagctccatatagtgctaggttaatattactaagttatggctgaaattcaatattctatgaaacatacaagtagggaatataattccttataccaacaatacagagatcatcacatatcattaagaataacagagtcgtaagcattttagttaaagtaaactcacaggacattgtcattttaagaaattactcaatttcaggacaactgacagatcatgggtagactcatcttcagtgacaattattttctaacattttccttattctttcaaacacatgtgaaatgcttttgcatctcaaagtatttatatcaataacatgtttgtccaaatttctcagggcatttctaattcttttcatttacttctggttgaaactctccatctttgattgctacaagctgagttttaattgagactgaataagtagcatgatctgcattattttctttagctccacagatttaaattccattgaaatgctgaaatttacatgtttttgtctccaggcccaactattccatgagctccaaactagagcgtctcacaccccctgtgtcccgtcctcctggatagctaatggatgtcttggatgtgggaaacttatccaggccagcatgggactctggatctttgccctaaacctgctcctccccaggcttcaccttctcagcagtggcatcacatccagccagctgctccagcccaaatgtgatgagatcattttgattccccttctctccacatcctctccccatattcaattcaacagcaggtgctgtcagtgctgccccagcctctgtctccctcgtgtctctccagggctgcactgtgacaaggccacggtgtctacctggacggccacagggactcccagttggtcttcctgcctctactgccgcccccgttgctctattccaacagggaaagtgtgacctcgtaagtcctgctcatcccctcccaggatttttcactgcacatggaaaggatccacctttctgcaaggtcctgcgtgacctggcacttgcctcgttttctgacgtgacctccttccctgctgccccttgttccagctgcactggccatttctccaacacaacaaatcctttctcatcatgccgcattccctgccccagaccttcacctggtggctgcctcaggttcttcaggactcaggggagatgttgtctcctcagatgccttctgggaccacctgaccaatgtggcacctcaagccagtcccgcctgatcacatttccctgttgggtggtccttgtggttctcatcactattacaattttcttgagctttgcaaccccctcttcaccttggatgtgaacttcagggaagcagggccgtcacctgccttgttttccactgggtgcccggctctgggaaagggcctgatgtgtggcaggggacacttcttccctggctgagtggatgggtgatgactgggatggaaagtgcattaaatgaggccaattctggggacagaggggagatgatgtgtcctgagatgggggactgaaacgtgtgacctggaggagatgacggctgagggatgacaaggagaatgggtggaagggagaaagggcattttgggcagtgggagtgagggaggagaagaatgttgaaaggaaatctgggagtgcaaagatagggtggtcagcagtggagccttgtcctggccagccgtgtgtgccctgctgaaggtgggtctgcacttgtagggaaatgagctctcaaagatccagggagaaagaagatccaggctggtattcccatggaaggggagtgaggctggaggcagggagactcagagggatggaggtctcgctgacctgagcaggagggagggacagggtttggagggtgtcatctgagagacacctgggtgggagggagagggaggagtctagggcggtgtgagctgataggggtaggcgaccaccgcctgggaggtccaaggagcctgcggaaagggcttgaggtttggggagggacctcccccagaaggagttgatggagcctcatcagtgtattgaaggccactgagacctccatcgaggatgaaatcaactgaggggtgaggtgggagagaggggccgtgtttgagggtggcactcgttccctgtgacctcaatgtcaatgtcccctgtcatggtgacatggccacacagacccatggcctcatgcagattgcctggtcccaccagccccaggagcagagctgagctgcaggtatttatggggacgctgaggcttgtgacttagccaggagggtgtgatttcccagcctccagcatcccgagtcctggggagccctggaggttctgcattgaggggttgtggggtagaggtagggggagaaaaaaggacagcttgggtaggtagggatggagaagtgtgttaaggttgatttcctgggttccgaaaacaggcatatcgactggacacagtggctcatgcctctaaccctagcacgttggaggttgaggtaggtggatcatttgcggtcaggagtttgagaccagcctggccaacatggcaaaaccctgtctccactaaaaatacaaaaattagccaagcgtggtggtgtgtggctgtattctgctactcaggaggcagaggcaggagaatcgcttgaacccagaaggtggaggctgcagtgagccaagatcgcgccaatgcactccagccaccctcctccccgccaaaaagaaaacaggcatgtctatgctacacctgtagagtttttcctcagtcgcatattttcacactgggaccctggtcacactctgcatatgcggtcacagccaaccccacacagatgccagaacacagaactgagctgcaggtgttcattggggtctctgtagtgatgaacagagccaggccaggaacgcggggagccccaaggaaggcaggagggccaatatctgatctgcaggggtcctcagatcagaaggctgcttctatgcaatcgttgctctgaaggatcttcttctgttggaaaaagaagaaagagaggagccggtggcctctgtgaaaggctccccagactcatcgttattgcccggtccccgagctcagaggagctccttgagtgtgtctgcttgttggggatcccaggctctggacaaagatggtggatgtgggttgtgtctcctgcttgagtgtgactctgcatgtgttggtgtaacacgtgtatgcatgtgtgtgggcaggcatggggtgtgtgtgttgctgttaacagcgtcctgtgtgagtgtgtgttgctgtgtactcatcatcagtgctttggtgcagtgattgtggttccctgcatgcctaggcctctcccgggcaccaggggcagaggttctccccttgcagagttgcagcgtctgggtcgaggacttggagaggtgaggcaggagggccctgttggggcaggtggggaacttcatctgattttgcgcatcctgggatgtggcttcctgcttaaaacgtggaaagcaggatggaaggcaagtgcagggaagtgcaagcctgggacgtgtggccatgtagtgtgtgcaggtccccccgggcacactcacaataacaactgaatgagcaaatctttctgtcacggagacattggcaaagcattgctggacattgaggaaggactcctctgtcaggggactggggttgtaacgagcaagctcctccttcaggaggtcttgggacacatcaaacacaacattcgcaagcagtttatcgatatccaggcaggcatcccctgtggaggatgaggtgagataagaaaacagaggaggtcagaattcagcgaaacctcccatggccaatgagaccttgggatggtgatgagagtgaaggagcagggccaccgcttcctcccagccctgctcgcctctttcttacccagctggacgctgcagatcagagccagcagaagagcacaggtggcggatgtcaccctcatgacagcggagtctggtcccagcaggcacaggcagggaatttggcgatgggtgagctttatgtatatctgaacaaggcacatgcctcttcgtgtgtgtgtgtgtgtgtgtgtgtgtgtgtgtgtgtgtgtgtgtgtgtgtgaatgtggtcagggcaggtctgcagagagaccctcggccctgggccatgctgttggggtggcagcgtatcgggaactggactcagcatgcagtgggaggggttgggtgttgtgacattctctctgtcctccctggagctccctgggattgggagcaggctgaacactggtgtaagcctgcaagtctgagtgtgcatgcacatgtgaccctgtgtcttggcaaacgtgtgtctgcacttggcacgccctagcacagaatctgccactgagtgctggctcaacaaacatttgctaagtgagtatgtctgtctgaatggatagcacattaggtgcagcttttgagaaatcagtaaactgtaatttagattcaaagaacattatctggagtaaaacacagaacctaaaggacatgagatgtagcaagtgtgttagggacacatgtgacacagtgaagggatcctacatgttggggaccagcctcaacactacccgtagggtacccgaagtctggtggtgacaaaggattgagaaaagacaagttaagagtgaaaggtggggagccagggggccagtgcaaaatgtggaggctgcaaaaggtgccgagctctggtctccacactatttattgagtacagtcccttcgatctaagaagcagatgttcagggagaaacagtgaaagggtggcagtgcatcacaggcataatctatagcaatagcagtttaaatgagtctcctttgtgctcaaacagcataactttaacttgttggagagtagctagtaggagcggccttgactgggagcctgcacgtctgtccacattccagtgtttcaaagaagtgtctttctccctgagcacagtgtttacagagaagacagcgggtcttgctctgagcatgggaacatgatggcaattaggaggctttcctcctcagaggccttttgtggctttccacaacttattcccgtatttttatggccagtttatacaggcaccccacaagcccttttcccagcacctacatatgagggagctgatgtcactcacgtgatttttgtctcctgacaggaccctaaattgtaagtgtgaccccaggggcagaatcagcaggtggggacagctgggggtggggaaggcagcagggatgctgacgcttgtacactcgggtgccagtgccgctccaatagcggtttgtgccctactgtgtcaagggagggtctggctaggagcacctgagggacacgcccggtgcagaggacactcactgggctgctgagagccatgtagaaccgcagagcagttcctagattaggctgtgccacccagactgagtgggctcacctcggccaggcatgagccatcactgtgcacgtacagaacctcatagtagcgcccaggacttgggcctcttaaaggacctacccagcattgggtaggacttagagtggccgtcaccagtggcagggccctgaacgcccccacattccagttgtaaagttgagtggatgagttgacagttggactggcagacgctgaagcaggggctgtggctgagcagggaggatggaggccactgccactccctggccggccacctgctgtgtcgtccctgccacctgtggtcctgcagcctgggctgcaacctgcgcagtgcaggcgtccatgcgtgctgagactctcagccggctctgtggcctgtcatgttgtgtgtgcgggacgaggcttgggtgcacgtgtgtgagaatgggattttgtgtgtgtgtgagtggaatgcgctggcaggattccacccactatgtggggtggagggtctgtgattatatgaatatgaggttgtgattgtggctgggaggggctgtgtggctgcctctgcctctgcatctgggtctgtgtctgagaaagaaagggagagatgggggaggcctggtgtggggacccagcagggcagggacaggggatgtttcctcactttacaccatttggggaccctccccagggggaaaagccaggtacagtggagaagcactgtctgagtgggcttcgtcctggggacagaggctgggagactgcagctgaaaggtgtgggctccaagagggccgcagtggggctgagcagcagagtcagggaatagaggacctgggagcagagggccgccctccctccatcttccttccctctctggaccccagagcactgtgtcccgtctcaacccccacagctgcaagtggagccagctggaggggtctctagagggaggggggtcctctgagggtagagagggccaggaggcttcctgaggacctgaggcccctctgggcctcccagggcttggagcatgtccctcccagtggctgatctgcattgccctgggagggacatgctcagtgatggggtttgtgcagctgtcactcaatcacctgcctgtgcccagccactcacctgtgactcccatcagccccaccacatgtgggtcctcaagtgccatgagaggaagttcctgcctgtgtcacatgcatccatcccacccaccacactgcaggttacaggactgccccacaagagccaccatgcccacctgaggttacctggcacacaggtatcctcacctgcatgacatgaccagatcgtgcactttctatgccagggccagggcaagcttgcacttttagccctggggacattgggggtggtggtggctggaggccagggaagtcaccaggctggagacatcatctacctccctagagggtttgatatcagacatctcccgtgcaccactttcagccatctcagcctcacctgggactctggctggcactgggaccagcagttccatgaaggtttagaccatctctaggcttaggaagtgcctcccttgtcatcactgtggtctgggctatgcgccttgtgaccaagggctctgggcagcagatgcagccagccagagggtgtgggtgaggggcctgggcacaggagggacgcgaggccttccctgcaccctcatggccaccgtttcagagggaagacaacaattatttggttttgccctgtgagcagcagcagagagcggggcccagggcaggtccagggccagacaggcatcccatgctgcagcctcgaggcctgcagggcacatgatggggccggtgtgggggcgtctcttgtgccaaacaactgggcaggaggtgccctggggctggtgggtgggtcagggcgttttcaagagccatgttaggatagagagtcctggagaatggagtgagggggcagagggggcagagaatggaggggtcggggagactgctcccactgctttctggcttctaagtgggggtgatgggtggtaggtgagtggcagaggggtcagcgggggctgcaagactgagccagggaagtggaggcagcaagaatgcaggccttgcctgaggctgactcggggctaggaattctcagaggtcagggccctagagctcccggacagggagtttgcaggaacagtgacgcagcacatgccacggcacaacttgacacaacacaacatggcacagcagagcagtgtgcggcacactgggctgcagcagagcgtggaatggggtctgtagggtctagggaattatggagcaaaccgacctgagccgtgtccctcagccaaggcacaggcactggccttgagccacccacttccttgtgacagcctcatgccctggcgtccttggggctgaggatagggctggggctgctgtccaaggtgaggtcactagaggggactctaatccccagttgtttgaggaacttgggcatcctgcagaggatttttggacacctcagccaggcttttggggtggtggggtctggacccagggggaaaaccatggggcatggctttgctgggatagggagggtaggggcaagagtgcagctgggtgtggccctgtaggcacagcatgtggcatctgccagtccccatttcctgccttgcttccagcctgtgctgtgatgcaggaatcacttccttgtgacaggtccgtgccctggcctctctgtggctgagacagggctggggctggtgtctaagatgaagtgtgactctaatcccctgcttctgatccccagttgtttggggaacttgagcatcttccagggacccagtggtgtagatgggactcctgggctgtttagtcaggcctcttgcccacgtggccacattggctcccactcaaatctggccttggggcctgcttggcctctgcttaccaagtcctgtggttctctgccaggcaccattggccctgcggccaggctggcacctggagaatggcctgcccccaaatcctgcactcctcccagctcacctgctttgcttttctcctgcactgggaattgggagctaggttgatactgggagaggagctccctcaactgtaggttcaccttagagttctgggacaggtttttgagagatgaggctttctagaagggcctggagctggtgagcctgctgagcagggagtagtcccacagcagagggatctatggtggaggagtgggatgggtggggaggacgacccagctgtggaggagttggggcaggcaggtcacatgggtgcagctcgccctttctccttctccccatctgtattagtctcttttcatgctgccaataaagacatacttgagactctgcagtttacaaaagaaagaggtttattggacttaaagttccacgtggctggggaggcctcacaatcacggtggaaggtgaaaggcatatctcacatggcggcagcaagagacagaatgagagccaagcaagacaggtttccccttatcaaaccatcagatctcgtgagacttattcactaccatgagaacagtgtggggaaaatccctcatgaatcaatgatctctcactaggtgcctcccacacatgtgggaattataggcatacaattcaagatgagatttgggtggggacacggagccaaaccatatcaccatcctctcttccctccctgtcctctcctgtcttttcctccccgccctgttctctccctcttccccctgttcctcagtcttcctgcctctcttcttccttctccatttctccccttcttcacttcccatttctccctttccctcctcccctgacctctaatcatctttttattgtgacatagaacacaagtatggagacgtacacaccatgtaaagtgtatcttaagtgattactgtaatgcaaacctcacaatgcgccctccagttcaagaaagatcattgtgagcccctcaaggcaccagcctcacctcctagagtagaccactgtcctgattttatggtttttttttattatactttgttttagggtacatgtacacaacgtgcaggtttgttacatatgtgccatgttggtgtgctgcacccattaacttgttgtttcagtggatggtttttctacctaaacatcttcatatacagtaaacgttaattttgctcttttacaatttatatggctgggatcgtaatgtgtctgttctcccgtatcttacttttttgttccccattgttgttgatattcatccatgttgttatctccattgtttaagtctaccctggtacactgattctattatcatgaacaacactgtagggagctttcatatgttgatgtcttgtacacgtttatattcacatttgttggggtttgtgcccatgtgtggaattttaggtgataaggcattcatattcttgactatcctaggaaacaggaaaccttgaaagcagttgtacaatgcacttccccagccacactgtagtatttcctgctgctctagattgccacaatctggtatcgtcagtgttgtgtgaaccatctggtaggtaggtgtcaggggcatctcactgtggtttccatttgcattttctggtgtaatgaggttgaggcctcttcatgtgtttattcgtcatttagtgaaatgtgaatggaatctttcttcccatttatatattgcatgttcttttctattttttccacctctgactgatttgtaggcgttctttctatattcttggtaagagcccttgtttggttagttgttgaaaatgtcttccccaacaccactgtggattagctttgtatgttttaatgattttaataaaaagaagtttaaagtttactataattaaatttatcaatgctatatttctgctcggggtgtggtgtgtgtgtgtgtgtgtgtgtgcattttgtttatgtaaacattcttatctcatggtcataaagatattcttttacataaagagttgtaaagtctttattattttgctttgtccattgaggtctataatccacatggaatggactttgtgtaaggtgtgggtaagagtccaatacctttttaattatttagatatcctgttgtcccagtaccatttaggagaagataatctttattctactgctctgtgtcctctttgtcaaaaatcaagtgcaccatagagggccgtagtttgcttctgagttctctattttgtctcactagtctgtttgtctgtctctatgccaatgtggcactgtgttgactacacactaaagctttagttcttgactctggtagagggagtccttccactttggccttgttcctagagtgtctttgctggttttggccctctgcattcccatataagtttagaaacagcttgttgaattcaatttggagagaactgaaattttgataatattgagtattcctctccataaagctggtacatgttgccatttattttggtcttccctattttctctcaataatttttacctatgtatctctgtaccactcatatgaatgtattaatttatttattccagggcacctgctattttaatgccattgtagatgttatcttctcttaaagtgtacatttatacatgtaagtgctgttgtataggaaattttaattattctatattgttttgtattcagcatttaaaaaaacttttaatattttatctgtagatgctctaagactatatataactctatctaatgcctatttgtttattcctcttcaatcctcagatttttacttgtcttgctttattgcattgtagaatctctaacacagtgttgggtaacaatggtgaaagtaggcttttttgtttagtatctgaacccaaggggaagggtttcttgtttgtttgtgttttgttcttgacagctttttattttataataatttttaaattttggcacagtttcaggcttatgaaaagctacaaaaattttaaaaagtatttctggatacccttcatccagattcaaaaggatagcttttgatatttcaccattacataggaagtttactgtaggatacttttggtagacactctttgttagattaaggatatattattttatttctgtcttctaagagcatttttttaaaaaaggaaagatgatgaattttagaacacatcttatttacatttaataaaatgtgcatatagttttttcttagttctgttaatgtgtccaagtatatcagatgatttttcaatgtgaaacctggcttgcatttctgggataaatctgccttaattggtatcattattctttttatatataatctcattgactttgctaatatattgtgtggaacattttgtctatgtccttgagtggttggattttggtgtcaggattataccagcctcattaaatgaatcaggggatgcagtggcggtttccacttattctaagagatctagtctaccctttccccaacctgctccataccccagaacatggccttttctggattgcatcattcggctacgttgccctttgtttttttgtgggttgatatattggagataaggcgggaaatgaaaaggaagaggagggtgagatgaagtaattcactcccagctgacttcccttagggctacaggttgacagtagctgcacccctctactgatggtcaaaggtcccgtgtgcttgacctttcctgcagttactggtctcagttcattgtagtaatagctccttttccttatctccctttagatatttcgcttttgctagccttgggtgttttcttattggcttcttttaactttgctcaccccacagccaagagccattcattaaactctcctcaggtgtcccatgtgagtttgccatttctttcctgcagggacactgatggatacagagaatgaaccatcattttttattgtttggaagaatttgtgtaaggttagagtggtttcctcattaagtatttgccagaactttccagaaaagctatctgcatgggattttctttgcaaaatctttaaaaattttaatttaattttacagataattagaggactgcatggccaccagcaacagttgcagattcttctgggtaataaaactcacaggcacaatagatgttcacctgactctaaattaacttagatttatgaaaggacaaagaaaaagcatgttcagcattttcagtgttattggtggggtgagagatgtccagcagcagcagtctaacatttcacaccaccattcaggaggatagttatttgggaattgaaattaatgtgcatgaggctcaccttggcatgttcatgtatcactgtctgatccagaatatcttacaacactggaggacagctccatgtccatgttaattcaggaaagtcattgccttgctttcctgacagtcttttacatggtcctaatcatgtcttcattcaatgtccatacaccactcactgccctcccaattcaggtgcaatcccccaagcaaagctttcacaataaacaatgcctgaaatgcagcatttctcattgatctaagtccattctaaggaggcagtgctggaggaaaatgagagcaatgtcattgttccaggattaattatagggagagagcctaggcctgctgttcacagtttgcccataaggactatgcaggatttctctttcttctcatgtcagtatttgaatatttttcttggaatttaaacacttcacctaatttaaaatacagacaaagtttccataatatcttattttttaatgttttattactttttttttttttttttaacagataacgtctcactatattgcccaggctggagtgcaggggctattcacaggtgagatgatagctcactgtagcctcaaactcctgggctcaagcaatgctcccacctcaatctactgaatatactcttattttatatggctgaagggtcttagggagatctccttttaaataatttattcattatttgtgtctttcccatttttctttttaatgtctccctttaggtaagtttgtcagttgttagcagattaatttaatgttcaagaatatttactttgtgctgctatattgccagacagtcttttacatgatcctaatcatgtcatcattcagtgtccatacatcactcactgccctcccagttcaggtgcagttccccatttcccctcactccattgatatcaggctcaggatgtccctagatttggacaatgggatgttagcagacaatagggagttaattgcttcaataggaccatgcagttagtctttccttcccacatccctgtggtcactatgagattaccttttccttagtaagtgatggttctttagggtgagcccctgaatgaatagatgttgatcagatttgagcccaacctacaggagtggccaagtcctaccaggcccacagcttgagtgctcaccatctagccgagcccagcttatatcagctgaaacaccagccaaactacagcacatgagtgatcatcaatgattgtcattttaatctattgaattttcaggttgtttgtgacacagtaaaagtgggccaattgaatccttactttctatagatatgaagagtttgtaatcttttattgatttttatgaaaattgcattgagatcaaattatatcctctattttaaaatcctttgaaatttgttgagatctactttatactctaatacatggtcaattttttaaatgatccccatgcagttaaaaagtgcatattcctccattattacatgccttattctattaagttgttcctaattgtatttttatatcttgtatatttttatttttattataacagctttaatgaagtataaatgacatataagaagcatgtatatctaaaatgtacaacttgtaacttttgacagttgtgaaaaaccagaaaattaccaccacaatcaaaatatgaacagattcatctcttatgaaagtttccttgtacctctttaagtgcctgtctcctgcctctttgtccccttccttctttctaggcaaccactgatgtgctttctgtcagtatagattagtttgcattttctagcacttcatgtacatggaatcatacaacatgcactatttttggtctgagttccttcacagatcttataatcttttggcttcattggtcttgtgtgtatcaatacttcatagctttttgagtcttaaatgttaaaaaatttacatgcagcaaactcaatctttttgatgtggatttccatgagttttgagaactctgtcttatgtaggttttgtatggatggctggagtcataggcacttccactacagtagagatgttgcttcctaacttcagatactccttgtgctgtgcttttgtagtcagatggtctccttgcccttaatcctgagtggccaccagcttgttcttcattccggtggctttgccttttccagaactgcttatcaatgaaatcatgtaagatgtaactttttgagtctggcttctttcaataattttctcattgacaaattctacctacgatcttaaaattttatttattcatttattttttgagacggagttttgctcttgttgcccaggctgccaggctggagtgcaatggtgtgatcttggctcaccgcaacctccaccttccaggttcaagcaattctcctgcctcagcctcctgagtagctgggaatacaggcatgcaccaccatgtctggctaatttttttttgtatttttttagtagacacggggttcctccatgttggtcaggctggtctcgaactcctgtcctcaggtgatccacccacctcagcctccgaaactgctgggattacaggcgtgagccactgcacccggctaatcttaaaattttaaaggtatcaatgtatctttattaatattcattttttcagatgttttaattactggaaataagattacccaatttgtttttttagaaatctggttcttctgtgtcaatatatttaatgtatttttacgtagttactaaaattttttttttattttacgtagtttttaaaattttttaaaaaaattttatgtagttttttaaaattttaccaactttttaaaaaattttacatagttactaaaaatttgtttttaattatgccagctttattggcataattgacaaataggaattgtgtatatttaaaatgtacagctttaacatatatatttacagtgtgaagtgaccaccatactcaaggtacctgacatatccatcatagatttaagatcatatttagaatttataaaaaggtattgaagtcagccagactcaaaggctacatcttgcatgatttcatttattagcaattctggaaaaggcaaagctatagggatgaagagcacaccagtgcctactaatgattaagggtggggagattatttgagtaaaaagggagagcagaagaaactttttgaggggtaggaaacaggtttttcttttctttttctttttttttttgctggtgaggacacttacttaagatataaatttttatcaaatttcaagtacaacagcttctccctttttcagttttgctttctgcagtttcagttactcgtggtcaactagggtccaaaaattggtgaggcagtacaataagaattttcagagacagacaatgaccagatttatataacttttattacagtatattggtataattgtcctattttataattagtacctgttaatctctcactcagttaatttataaattaaactttatgataggtatggatgcattgtaaaaaaaaaaaagcatagtatattgtacacaaggttcagtactatgcataggttcaggctttcacgggggattgtggaatgtatcccctgcagataaaggcggactcctctctacaatagagtattattaatcgtggccaccacgctgtccattagatcttcagagctcacttaccttgcatagctgaaactctgtaccctttgaccaacaacttctcactcattcatcccccggctacactttgccccaggcaaccaccattctactctctaattctgtgagttcagtcattttagattctacatagaagtgaggtcatgcaggatttgtgtttctgtgtctagcctatttcactaggcataatgtcctacaggttcatccgtattgttgaaaggagcaggatttctctcttttttaaaaggctgaatagtattccattgtatattttataaaacatagaaagatagatggatggatagacagacagatagatagcttttgtgtgtgtgtatatatatcacattttctttatccattcatccattgacaggcatttaggttgtttccctatcttggtgaccatgaataatgcttcaatgaacctaggggtgcctatctattgatgttatttcctttagatatatacccagaagtgggatttctggatcatacggtagctctatttttaagtttttgagaaacctccattttgtttttcataaaggctgtaccattttatatttttaccaatagtgcacaagggttccaatttcttcacatctttgcaaacacttacgatttcttgtcttttggatagaaaccatgctaatgtgtgtaaggtggtatgttgtggttttgattgccatttccctgatgattcgtgatggtgaacatcttttcatgcatctgttggtcatttgtatatctttttaggaaaaatgcctatgcagggcctttgcccatttttaattggattgttttttgcaatgagttctatgaattaattacatattttggatattaatcccttatcaaatatatggtttacaaatattttctctcattttttaggttaatacctccagcttcatcttctcactcagaattcttttggctttttgagcttttttgtgattccataaatattttgggatttttttcctttttctataaaaaatgccattgggattcatggaatctgatagggattggcttgaatctgtagatcactttgggtattatgaatatttcaatattcattctttaaatccatgaaagtatgaagtcattttattcagttgtgtcttaattttcctcatcgtgttttatagttttcagtgtgcaagtattacacctctttggctaagtttattttcaagcattttattctttttgttgttactggaaatgtaattgccttcttattttcttttttggatagttcattatcaatgtatataaatgtctccaacttttgtatgtatattttgtatcctgcaacattactagacttatcagtaatttaacaataaattgttaattatgctcaccctacagtgctatagaaaactagaacttattcctcctatctagttgcactttgtaccattaatcaacctttggctataaacccctctcccaaacttttccttgcctctagtgaccattattgtacactctccttctatgagatgaacttttttagcttcggcagatgagtgagaacatgcagcatttatcttcctgtgcctggcttacttcacataacacaatggctccaagttaatccatgttgatgcaaatgacagaattttataattttttatggctagtgtctcattgcatatatatatatatatatatatataccgtattttcttcatcttttcacttgttgatggacactgaggttgagtcaaatcttggctgtgaatagtgctgcaataaatgagagtgctgcaataaatgagtgtgcagatatgtcttcgatatactaattttctttctttttttcttggatgtatacccagtaatgatattgctcgatcatatggtaattctatttttgtttttttgagaaacctccatatcataatgcctatcctaatttacattcctatcaaccagcaagagttcccatttccttgcttcctcactagcatttgttatcttttgtaattttgataatacccatccctactgaggtgagatgatagctcactgtggttttgatttgcatttccctgatgactggcgatgttgaccatttgaaaaatacctgttgaccatttgtatgtcatcttttgagagatttttattcagctaatatgcccatttatacatcagattatttgtgtgttttttccatgttgagctgtttgagttccttgtatattctggatatgaatcctttgtcagatgaatagtttgctaatattctttcccattctgcaagtcatctcttctctctattgatcatttcctttgctgtgccgaagctttttagtttgttatagtcctgtttattttttctttttttgtttgtgcttttgaggttttctctataaaatctttgccaagaccaatgtcctgaaaatttttcttcatattttcttctagtagtttcatagtttctgctctaagtctttaagctattttaagttgatttaaggaaaaatatgattagagatggatgtctggtttcatatttttggcatattaatatccaattttcccagcaccatttattgaagagactgtccaatcctcagtaaatgttcttggcacctttgttgaaattatgttgatggtaaatatgtggatttatttctgtgttgtctatttagttccattggtctatgtgtctgtttttatgccagtacaatactattttttaaaaaactatagctttatagtctattttgacttcaaaaagtgttatgcctccaacttttttcatttttctcagggttgctttggttatttggagtcttttgtggtttcataccaattttaggactgctttttctacctctgtgaagatgtcgttggtatttttatagagattgcattgactctgcagattgcttttggtaatacgctcatttttacaacattaattcttccaatcatgaacatgagacatcttttcacttttgatgtcttcttcactttctgtcatcaatgttttatagcttttttggtagagatctttcacctctttggttaaatttattcttttttttggtggctattttacatgtgattgacttctcgatttcttcctttactaatttgttgctgatgtgtaggaatgctactgatttttgtatgtcgattttgtatcatgtgcctttactgaattcctttatcagttataagagttttttcttggtccttttagggttttctatatacaagatcatgtcatctgcaagcagagaccatttggcatcctcctatccaggctgtatgctctttatttcattctcttgcctaattgctctggctaggacttccagtactattttgaataaaagtgatgaaagtggccattcttgtcttgctccagattttagaggatgacatttcaacttttctttattcagtatgattttggcgatgggtttgccatatatttattttattatgttggggtacattctttctatacccggtttgttaagagtttctataatgaagcattgttgacttttatcaaatgcattttctgtgtctatttatatgatcttacagttcttgttcttccttctgttgatgtgatgtgtcacaagtattgatttgtatattttcattcacaatccttgtattcctgggagaaatcccacttgatcatggtgaattagcattttgctaagctgttgaggttggtttgctagtattttgttgaggatgtttgtatctatgtttattatggatattggcctatagttttttttttttttctgtatgcgtgtgtccttgtctggtttttctatcaggatatactggttttgcagagtgagtttgaaagaattccattcttttcaatttcttggaagactctgagaagaactggtatcagttctacttaaatattttgtagaattctggaaggaagtcagtggagtctgggttttttctttgatgggagatattttattagagattcaatctcattacttgcaattgctcaattcaggagttctgtttcttttgggttcaatcttggtaaattttatgtgtccaataatttacatattttctggttggttttctaatttgttagcttatagttatttgtagcagtctctaatgatattttgtgtttgtgtgatatcagttgtgatgtctactatttcatttttggttttatttacttgtgccttttttcttgtttcatagttagtctggttaatggtctgttgattatttttatcttttaaacataaccagcttttcattttttgatctcctgttttttagtctcaattttatttacttctgctgtgatccttattatagttttcctcctactaattttgggtttgatttgtatttgttcttctagttccttgaaattcattgttaagttttacttgaaatctttctgtttttttgatgtgagtacttactattaaacttcccagttactgattttgctgtgtcctatagatgttgatatgttgtgttggtttcatctgaactctttctactttttaaatgtaggtatttatcatcaaaatttcttgtttatatagcttctgctgcatcccccaggcttttgtatgttgcatttctattttaatttgtttcaataaattttaaaatttactattttttttttttttgggatgaagtctcgcagtgttgcccaggctggagtgcagtggcacgatcttggctcactgcaacctccgcctcctgggttcaaaggattctcctgcctcagcttccctagtagctgggattacaggtgcctgctaccacacctggctaatttttttttgtatttttagtagagactgggtttcactatattgggctaggctggtcttgaactcctgacctcgtgatccacctgccttggcctcccaaagtgctgggattacaggcatgagccaatgtgcctggcccaaaatttacttcttaatttctttattaactcattgttgaattttcatatatttgtgttttagaaaattcttttttttttttttttttttttttttttttttttttaggatagtctcactctgttgccaggctggagtgcagtagcatgatcttagctcactgcaatatccgcctcctggattcaagtgatttcccctgcctcagcctcccaagtagctgggcctacaggcatgcaccaccacacctggctaattttttgtatttcagtagagaccgggtttcactatgttggccaggatggtcttgatctcctgacatcgtgatccgcccaccttggcctctcaaagtgctgggattacaggcatgagccactgtgcctggctgaaaatttatcttgttattgatttgtagtgttattttattgtacacagaatagatacttgatatgatattggatgcatgcattcaatatgtaataatcacattagggtaaatggaatatctatcacctgaagcatttatcctttgtgttacaaataacccaatcatattcttttcatcatttaaaaatgtagaattaaattattattcactactgtcactctgttgtgctatcaaatactaaaccttattcattcttttttaaatggtcttatgaaaggaatttatattttacagttgttggatgaaatagtctgtaaatgtctgttagatttgtttgatctaacgtgcagcataaatccaacgtttctttgtcaattttctgtgtagatgacctgttcactgctgagagtggggtgttgaagctccccaactgtaattgtattggagtctatctctctccttaaatctaataatattggttttatatttctttgtgttccagtgttgggtgcatatgtatttagaattgtcataccctcttggtatattgattgatcttttaccatttgatcccgtatcacttgagcccttattaatgatcctttgtcatggagtcatttatccttttatcattatgaatgaccttctttgtctcttatagttttatgttaaaatctacattatcagatataagcatactgactcctgattgcttttgattttcatttgtgtggaatattttttccatctcttcattttcttttcttttttttttttttgagatggagtttcactttgttgcccagggtggagtgcagcggtgcattcttggctcactgcaacctccacctcctgggttcaagtgattctcctgccttagcctcctgagcagctgggacaacaggcacatgccaccatgcccagctaatttttgtatattcagtagagatgggtttcaccatgttggcccagctggtctcaaaactcctgacctcaagtgatctgtcccccttggcctcccaaagtgctgggattacaggtgtgagccattgggcctggccatcatctcttcattttcaattggtatatatctttataggtgaagtgagtttcttgtaagcagcatatttttgagtcatttaaaaaatatcaattcagacagtttctatcttttaagtggggaatttagtctgttttcactcagagttattgataagtgaggacatattcttgtgattttgttaactgttttctgagtgttgtgtatatcctttgttgttttcttcctctgtcattgtttgtcattgcactttggtggatttctgtagtgataacctttgattcctttctttttctcctttatgtatctgccccacccataagttttacacttttgtgtgttttcatgatagtgattattatctttttgcctccagatgtagtacttctttgagtatttctttttaagcctgtctgatggtgtttaatgtccttagagtttcttttgtggaaaaaatgttattactctctcatttctgaagcatagctttgctctgtatagtattcttgctggacaagttttttctgtcagcactttgaatatattatcccatactctcctggcctgtaaagtttctgtgaagaaaattgctattggtctactggcaatttctttatatgtgacttgacgcttttgctgtttttagaattctccctccttctttgacttttgataatttgactgtaatgtgccactgggaggaactttcagctgaatcttttttggggccttggatctagatgtccattctctctccagacttgagatttttttgcaattatttcattaagtcagttttctatgccttttctcttctcttttccttctgggacttctgagttccaacatttattcacctagtggtgttgcataagttttataactttttttttcactgtttttcactcttatatcttaatttttctgtaattgggtaattttaagtgacctatatttaagttcagagattctttcttctgctcgatcaagtctgctattgacactgtccattttattttttaaatttcattcattgaattcttcagttgcaggatttctgttttttaattattattcctatcgctattgaatttctgattcatatcataaagtttatctgattttattgaattgtgtctgtattttcttttatcttgtcgagtttccttaagattagtagtttgaattccttttccataggtcatttatttccttttcattgatgtcttttaccagcaagttattatgttcttttggtaatgtcatatttccttgcttttaaatgtttcttttggcacttcagtgttatctgtacatctggtggaacaattgcttctttcaaactttttagagttgctttcataaagtaagactttcccctccagttggatattcttgtgccagttggcaagaaattggtgactgtttccaaattagtatagtggtatggtctacatgtagtttccttatctgtgttgaatgttatcaataactatgagtgaccccatggcctagactgcagatgtttgtgacagtggttgcttaggttgttagcatcattggtcaaggctttgggggccttccaattcttatttttctgctcagcaccacaggggaagggtgtaacagctgctcaaagctcagcttggggatgttaggccactgggctggagtgcttcaacagtggcttaacctctggcatgaaggggatctgtggctattagcccccagaacaagatgcactccagtcatagttctaaatgtgagatggcacagtgcaatagctgtatgggccacagggagcaggacacagggtgggcttcttctctggaaggaacacagccatatatatatatggactctaggcagcttcctcagtcaggcttagtgtctaaaatactccagtggtgaggtctgtgggtgtccaatatgttgatgggggttattgggatcctctggtttaccttctcactgaattaggagaagttccttctaattctcagctgatcatgtgtaggggatgggacagtggaggtccagcatttttttttttttttcattctcaatgtaggcatcctgagtttctgtgctcattagagtttctgtgacttttctgatgcattcctgtactctccttcaagtatgtagttgtttattcatattcatactgtctttgggggttagaagcaataagagcttctagtctgccatgttgctgatgttactcctgtaattttattttcttgtagtgtcttttgtgtggatttggtatcaatcatggtaatggtggcttcataaaatgtgtttgaaagtattctctctacttctatttttggaagagtttaaaatagattggttacatatgtatacatgtgccatgctggtgtgctgcacccactaactcgtcatctagcattaggtatatctcccaatgctatccctccccccaccccacaacagtccccagagtgtgatgttccccttcctgtgtccatgtgttctcattgttcaattcccacctatgagtgagaatacgtggtgtttggttttttgttcttgcaatagtttactgagaatgatgatttccaatttcatccatgtccctataaaggacatgaactcatcattttttatggctgcatagtattccatggtgtatatgtgccacattttcttaatccagtctatcattgttggacatttgggttggttccaagtctttgctattgtgaatagtgctgcaataaacatacgtgtgcatgtgtctttatagcagcataatttatagtcctttgggtatatacccagtaaagggatcactgggtcaaatggtatttctagttctagatccctgaggaatggccacactgacttacacaatggttgaactagtttacagtcccaccgacagggtaaaagtgttcctatttctccacatcctctccagcacctgttgtttcctgactttttaatgatcgccattctaactggtgtgagatggtatctcattgtggttttgatttgcatttctctgatggccagtgatggtgagcattttttcatgtgttttttggctgcataaatgtcttcttttgagaagtgtctgttcatgtccttcgcccactttttgatggggttgtttttttcttgtaaatttgtttgagttcattgtagattctggatattagccctttgtcagatgagtaggttgcgaaaattttctcccattttgtaggttgcctgttcactgtgatggtagtttcttttgctgtgcagaagctctttagtttaattagatcccatttgtcaattttggcttttgttgccattgcttttggtgttttagacatgaagtccttgcccatgcctatgtcctgaatggtattgcctaggttttcttctagggtttttatggttttaggtctaaggtttaagtctttaatccatcttgaattaatttttgtataaggtgtaaggaagggatccagtttcagctttctacatatggctagccagttttcccagcaccatttattaaacagggaatcctttccccattgcttgtttttcttagttttgtcaaagatcagatagttgtagatatgcggcattatttctgagggctctgttctgttccattgatctatatctctgttttggtaccagtaccatgctgttttggttatgtagccttgcagtatagtttgaagtcaggtagtgtgatgcctccagctttgttcttttggcttaggattgacttggcgatgtgggctcttttttgcttccatatgaactttaaagtagttttttccaattctttgaagaaagtcattggtagcttgatgaggatggcattgaatctgtaaattaccttgggcagtatggccattttcacgacattgattcttcctacccatgagcatggaatgttcttccatttgtttgtatcctcttttatttcattgagcagtggtttgtagttctccttaaagaggtccttcacatcccttgtaagttggattcctaggtattttattctctttgaagcaattgtgaatgggagttcactcatgatttggctctctgtttgtctgttgttggtgtataagaatgcttgtgatttttgtacattgattttgtatcctgagactttgctgaagttgcttatcagcttaaggagattttgggctgagacaatggggttttcaagatatacaatcatgtcatctgcaaacagggacaatttgacttcctcttttcctaactgaataccctttatttcgttcttctgcctcattgccctggctagaacttccaacactatgttgaataggagtggtgagagaggacatccctgtcttgtgccagttttcaaagggaatgcttccagtttttgcccattcagtatgatattggctgtgggtttgtcatagatagctcttattattttgaaatcgttggaaaagcgcagtattcgggtgggagtgacccgattttccaggtgccgtctgtcacccctttctttgactaggaaagggaactccctgaccccttgcgcttcccgagtgaggcaatgcctcgccctgcttcggctcgtgcacggtgcgtgcacccactgacctgtgcccactgtctggcactccctagtgagatgaacccggtacctcagatggaaatgcagaaatcactcgtcttctgcatcactcacgctgggagctgtagaccggagctgttcctactcggccatcttggctcctcccccgcatgtgtctttatggtagaatgatttatagccctttggatttatacccagtaatgggattgctgggtttgaatggttaaatccaattcttaataaaagcttataaagaaatctatccaatcttaactagtttgaccataatgcaaactttttataaaccttttacaaccctttacaattttctgttgaacagcagattaattctataagaaaaacctgttactcaaatacatgggcccagattctggccctgtatcagtgtgcttttattttattgtttaacctacagagaaattaaataatgcccttcaaatcttagccaactttctcatacccgcagactttccttcacaagattaatgcttcacaaattcttcacaacttgcttgaacctttagtttttttcccccattactcttttaggttaggacaatccttaaaaactgctgaactagacaaaattacatctttttaacaaaagtcatactcccataccttttatcaccttttaccaaaatcacactttaccttccttacacaccctgcatgtgaaactctttcttcagtagtttcaagcacatgttataatattaacttttagcaactcttatttttggtggaaaagatggtaaacaagcaattttaaccatgtatcagattgcagatctcaggatgaggatagagctgcagatagtgtccaactctcccaaacttagccaggggacctggcctaagccttacctaaaatctaatggctataaaacagacaagtcaaacaattatttaaagtcatagaagcagtttatggccttaaaacacatggcaaacaggttcagcctgcctactttagaccaaatgtctaaattttgaatatatttattttattttaccaataatcttttacattgtcttttttaaagaaattagagtcccatgacctaaatccattaaagtttctatttttttctgacaatatgtttaagtgcttatatttaggacaattaattacagctcttttacaccacacacgtaacacacataatacacagacaaaaacggagatccaagacagaatttcatcaataaagaaatctttagagggagagtgggggctttaaaacaatattcacgcatatataggccaaatatcagctttaattaagtcaacttttaagtatagagatcttaagattctttaaaaatcttttattaccagcttttagccaagacaaagggccaatatttctggcttttgaattttttttactaaaggcaaccttctacatgaaatcagtaagtcttaactaagaggatggtaaccttggatgcatgaagtgtctccaaagagatggcaagcgatgggcaaagagacggcaagcaatttttatgagatgtagaatctccccaaaggtagttcaggaaaaagaaaatttcaagacacgaaatcagaagctgtccacaaagaggaaaggaagcaataaatggcaaaaagtcaaacacacataaaatcagaaaagactgattccctaagccaggaattgaacccaggccaccagcatgaaaagacaaaaaccttaactactgagcacaaggtgactgaaattgcttttcctgaaaggaatcttgagcagttatttttgaagttgcaaaggattttaactattcaagagaattaaggtgagaattaacataataatgtcccttttttagacccaagaatcaaagctttgtaactcaactgcacagggctttaaaggcaatacagaaagttacttggatgaataaccttttcaagtgcacaactggaattaacttttagataacttttgaattagataaaattattcttttttaaaaaaaaatagaacacattttccttggcacattttatgtaaacccaggaagcaagaaatcctaaattgcctatcagatactagcattttatagatgagcaccattctacaattttggaacgtgttctcaatataataatcttttcttaattggaaatgacccaggtatatacccaaagaattataaatcactttactataaagacacatgtacacatatgtttattgtggcactattcacaatagcaaagacttggaaccaacccaaatgtccatcaatgatagactagattaagaaaatgtggcacatatacaccatggaatattatgcagccataaaaaaggatgagttcatgtcctttgtagggacatggatgaagctggaaaccatcattctgagcaaactattgcaaggacagaaaaccaaacactgcatgttctcactcataggtgggaattgaacaatgagaacacttggacatagggtggggtacatcacacaccagggtggggggaggggggagggattgcattaggagatatacctaatgtaaatgacaagttaatgggtgcagcacaccaacatggaacatgtatacatatgtaacaaacctgcacgttgtgcacatgtaccctagaacttaaagtatatattttaaaaagtcagatgaattttctgcctaggaaaaagcatttaaattataattcatagttccaatgagttggcagtgaaattggggccatgagatgttccagcagcgatggagatggggcaaatcttatagtattaacatcacaccatttggcaataatgtcaaaagttacaaaaatacttgaaatcagtaattatgagaatgtatactgggaaaactttcaaaataaattcaatctatatgcaaaaaaagagaatgttccaatacttgaaatcagtaattatgtttatgagaatgtatactgggaaaactttcaaaataaattcaagctatatgcaaaaaaaagagaatgttcctattccttatttataatccttaaatagtgttcctattcctgaaagattaaagtcgcatgaagtaaaaggcattacagcttttatttttccttcaaaaaatattttatctaagtgcttatttttaaagccagttaattataactttttttgtataaccattacacacataacatatatatgactacacagacagaagaaaacccagcagttgtaaggtttttttgttcgtcaattttctaattggattattggcctcagggtggagctctttaagaacagggctaggaaagcatacagtttctagggcctaataaacaggcatacctgaaaggcaaaaagagattttgagtgggttatattcacctctaattcttggggtttcatgaggaaaagagagatgtctcacaaaatggaatccttggcattttttttttttccccaaggagtcccaggccatcagaagctatctagggcctttcatacatgcactgactggcaagacaaagtggagaaaagtaatttagtcaactgagaaaaaaaaaaaccttttcagaaaaacaagatccaaggagagaaaaacataaaaatcttttaaatatatctataacttggatatcctcttttaattaagctgagcattctttaagaatatcctttttcattaattaaaactttacagggaatataaacaatgattcttatcattcctttcactggtttgcacagggacagagaggccaaaagtctgactgtaaaaaaacttttatccttttaccagcatgtctggcttctgggttttctaggggagtttctttgaggtcctccttggctgcataggtttgcatgactgttcaaagccatattcaggttcttcagtttcctctgggaggaaagtgtctgggttcaggcaaggacaggtttttttaactggactgtagattcctctaacagcagagcctgatctttgaggaggtgattatctgttggccagggacttctcttagaagacagcagttctgccgcattatgtgggttatatacagttaagtcattcctcatggttaacttggtggccactgacaccagtaaagccactgctgtaactgctcagaggcaagctggccgtactttagccatcaactcaagctccttgcttaggtaacctactggctgttgagctggaccttgagcctgagttaaaactcccagggccattctcttcctttttgctacatagagactgaatgtctttcctatgggaagactaagggctggtgctttaagcaaggcttgttttaactggttaaagcctttttgagccccaggttcccaagtcagggactgagttttagctgcttgcatttcttttatgaggtggtataaagggcgagttatctcactgtacctgggtattcctagtttgcaaaattcaataatgcctaagaatcccttcagatgtttaagcattttgggaagggcaaagaggaaatgggcttaatcatttccttacctagtgctcttgttccttctgacaggactagatataggtactttactgaagtttgaaagagctgagccttaaattttgaaaccctatatcccctttcagctaaaaaattgaggagagcctcagtgtcttcctgagactttctcagttggggcacagaggagaatgtcatctacatactgcaaagcttcaacctgagggtgagaaaaatcagagagatctttggacacggcctgtttttgcaacttccttcagatattaggggctgcctgagtaataaacttgtcctttaagattagctgtccttcaattgaaatgagagatagaaaggtgtgtttcactaaagcttctctcagcctttccaaaaaggctgaggggttttcatctaggtttttttttttttttattatctattatggaaagcttgtagtagttaataggtttggctatagtcctttgtggcttctccaatatacgcatttgaaagagttttcttctccactcaccaatgctattattatggtcacatttagggtcctttaagggcactattactctcccaattggataaggctcttccccttccctggcactgtatgagacacaaagttcatctccaaatttctttgctgcctacagggccaactgtttctcagcagcagttagggtttgatttaagagtaacctaacatccttccagcagagtttaaatactctatatgtgagtgaagttgggactttcctaaagcaaacttcagggtctgacgattaaaagagatccaggctgcactcgaggaaagtgcaggcttgaagatgggttgttaagtatctggaaagagaggggagaaaaggcataccttagtccacttcctccttttggagtgacccagggtacagagaaaggtagaaagggcgtcctccttctcctctttcctcccatctcctctgggtcctggtggccatcaattgtgctgcccatggatgcaagcattaccacccatggatccagaggagctagtcagcaggagtagtcatgtttacctgtgagattccctagctctctacctatctctgggtatcccagacctactcgacctaaaaggctcccatggtaccccaggggcccaggagggattgtgcagtagttggatttgagtaagaccatttaatggaaggagtgtcttgactctgtccctggcttctcttactgtggccctagcaaagccctgatttcccagagaatgggaccaattgacttctaagcataaaatcctcttttgtttaaatgccaatgtagttgtgtttaggacaggtgcctcaaaaaatataaggattaaatggctgtcctaccttcgatgaggacagtactgagcctagaatttgtctctcaagggcagcttcctcctgactattgaaagtggagttttcctgcctacaaatagggcatgaggtctgatcacttatagagggatgcaggaggaaaaagagttggggaactagaggttttgggaaaagggtcaatatggccccccaacacagaaaaatcctattttgctaggtgttgtggcaataactgaaatgttaggtaaaaactgtgactccaaattctttctaggcagagaggtgtggggcttggtgggctgtccccacaatatgcctcccagcaaaaatacaatttgtctcatggaggaactgtttaaattcactggcagtgctgagcttttatgtggaggaataaaacaacccaaatggagaggagggtattcactcaggttgaaatatcctcctatagagtgccatgaatgactatcattggggaacaaaaaagcccttactaggtgaaagtttagttcagtttagtttagtttagttgaaagtttagttgaaatcttgaaatccccccatctcaaggaaatcacagaagcagcaattcttagagttacattcctggttactaaggcacttgctaactttacccaacaaggttatctccccaggctgtaaaaactccctcaacatagcatacaaagaagggataggagacatgagagctgcaaaaaagaaaagaaaggaagaaaatgtgataggaaagtctggaagtcctggtgggctgttggggactggagttagtccaggagtcttcaggtaacaccaaggtgcagcctccgccagatgccttcagttgccccaggaccttcttccagccccacatgatggctagatcttctgtgaaagggagctaggttggaacagagccaacattcccaacacccaagagtgatgggggattgataaagtcctctccatcaagcctgtcccctgaatcttgtaaggctggcagccactctagaagcttttaataggctgacaggggcccagtgttttgtttgatcttacaagaaaaaaacagaggataaggagccttggaaatgaaagtacagtgttggaggtcctctcctactcatctttctgatgtttcctttcctggccaatgcaccagtgttgcattcttgttatctgaggtattactcagagtattatctgcttattctactgagtaacatttctgcagtttgcagcaaaacccttaatattataaaagaagtgaggtggagccaagatggccgaataagaacagttacagtctacagctcccagcgtgagtgatgcagaagacggctgatttctgcatttccaactgaggtaccgggttcatctcactgtggagtgttggatagtgggtgcaggacagtgggtgcagcgcaccgagtgtgagacgaagcagggcgaggcatcatctcatccgggaagcacaaggggtcagggaattccctttcctagtcaaagaaaggggtgacagacggcacatggaaaatcgggtcactcccaccctaatactgcacttttccaatggtcttagcaaactgcacaccaggagattatatcccatgcatggctcggagggtcctacaaccacggagcctcgctcattgctagcacagcagtctgagatcaaactgcaaggcagcaatgaggctgggggaggggcgcctgccattgccaaggcttgagtaggtaaacaaagcagccaggaagctcgaactgggtggagcccaacacagctcaaggaggcctgcttgcctatgtagactccacctctaggggcagggcatatccaaacaaaaggcagcagaaacctctgcagacttaaatgtccctgtctgacagctttgaagagagtagtggttctcccagcacacagcttgagatctgagaacggacagactgcctcctcaagtgggtccctgacccccgagtagcctaaatgggaggcacccaccagtaggggcagtctgacacctcacacagccgggtactcctctgagacaaaactttcagaggaacgatcaggcagcaacatttgcttttcacccatatccgctgttctgcagcctccgctgctgatacccaggcaaacagggtctggagtggacctccagcaaactccaacagacctgcagctgagggtcctgactgttagaaggaaaacaaagacatccacaccaaaaccccatctgtacgtcaccatcatcaaagaccaaaggtagataaaaccacaaagatggggaaaaaacagagcagaaaaactggaaactctaaaaatcagagtgcctctcctcctccaaaggaatgaagctcctctccagcaacggaacaaagatggacggagagtgactttgacgagttgagagaagaaggcttcagacgatcaaactactctgaactaaaggaggaagttcgaacccatggcaaagtagttaaaaaccttgaaaaaaaattagacgagtggctaactagaataatcaatgcagagaagtccttaaaggacctgatggagctgaaaaccacggcatgagaactacatgatgaaagcacaagcctcagtagccgattcgatcaactggaagaaagggtatcagtgacagaagatcaaataaatgaaatgaaatgagaagagaagtttagagaaaaaagaataaaaagaaacgaacaaagcctccaagaaatatgggaccatgtgaaaagaccaaatctatgtctgattggtgtacctgaaagtgatggggagaatggaaccaagttggaaaacaatctgcaggatattatccaggagaacttccccaatctagcaaggcaggccaacattcaaactcaggaaacacagagaataccacaaagatactcctcgagaagagcaactccaagacacataattgtcagattcaccaaagttgaaatgaaggaaaaaatgttaagggtagccagagagaaaggtcgggttacccacaaggggaagcccatcagactaacagctaatctctccgcagaaactctacatgccaaaagagagtgggggccaatattcaacattcctaaagaaaagaattttcaacccagaattttacatccagccaaactaaccttcatacgtgaaggagaaataaaatcctttacagacaagcaaatgctgagagattttgtcaccaccaggcctgccctacaagagctcctgaaggaagcactaaacatggaaaggaacaactggtaccagccactgcaaaaacacgccaaattgtaaagaccatcaatgataggaagaaactgcatcaactaatgatcaaaataaccagctaacatcataatgacagggtcaaattcacacataacaatattaaccttaaatgtaaatgggctaaatgctccagttaaaagacacagactggcaaattggataaagagtcaagacccatcattgtgctgtattcaggagacccatctcatgtgcagagacacacatagtctcaaaataaagggatggaggaagatccgccaagcaaatggaaaacaaaacaaaacaaaaaagcaggggttgcaatcctagtctcggataaaacagactttaaaccaacaaagatcaaaagagacaaagaaggccattacataatggtaaagggatcaattcaacaagaagagctaactatcctaaatatatatgcacctaatacaggagcacccagattcataaagcaagtccttagacacctacaaagagacttggactcccatacaataataatgggagactttaacaaacatcccactgtcaacattagacagatcaacgagacagaaagttaacaaggatatccaggaattcaactccgctctgcaccaagtggacctaatagacatctacagaactctccaccccaaatcaacagaatatacattcttctcagcaccacatcgcacttcttccaaaattgaccacataattggaagtaaagcactcctctgcaaatgtaaaagaacagaaattataacaaactgtctctcagaccacagtgcaatcaaactagaactcaggatcaagatcctcacttaaaaccgctcaactacatggaaactgaacaacttcctcctgaatgactactgggtacataacaaaatgaaggcagaaataaagatgttctttgaaaccaacgagaacaaagacacaacataccagaatctctgggacacattcaatgcagtgtgtagagggaaatttatagcactaaatgcccacaagagaaagcaggaaagatcaaaattgacaccctaacatcacaattaaaagaactggagaagcaagagcaaacacattcaaaaagtagcagaaggcaaggaataaataagatcagagcagaactgaagaagatagagacaaaaaaaaactcttcaaaaaatcaatgaatccaggaactgtttttttgacaagatcaacaaaattgatagactgctagcaagactaataagaaaagagagaagaatcaaatagatgcaacaaaaaatgataaaggagacatcaccaccgatcccacagaaatacaaactaccatcagagaatactataaacacctctacacaataaactagcaaatctagaagaaatggataaattcctggacacatacaccctcccaagactaaaccgggaagaagttgaatccctgaatagaccaataacaggctctgaaattgaggcaatcactaatagcctaccaaccaaaaaaagtccaggaccagacagattcacagctgatttctaccagaggtacaaagaggagctagtaccattccttctgaaactattgcaatcaatagaaaaagagggaatcctctctaactcattttatgagggcagcatcatcctgataccaaaggctggcagagacacaacaacaaaaaaaagaattttagaccaatatcgttgatgaacatcgatgcaaaagttctcaataaaatactggcaaaccgaatccagcagcacatcaaaaagcttatccaccacaatcaagttggcttcatccctgggatgcaaggctggttcaacatatgcaaatcaataaacgtaatctatcatataaacagaaccaaagacaaaaaccacatgattatctcaatagatgcagaaaaggccttcaacaaaattcaacagctcttcatgctaaaaactctcaataaactaggtattgatgggatgtatctcaaaataataagagctatttatgacaaacccacagccaatatcatactgaatgggcaaaaactggaagcattccctttgaaaactggcacaaggtagggatgccctctctcaccacccctattcaacatagtgttggaagttctggccagggcaatcaggcagaagaaagaaataaagggtattcaattaggaaaagaggaagtcaaattgcccctgtttgcagatgacatgattgtacatttagaaaaccccatcgtctcagcccaaaatctccttaagctgataagcaacttcagcaaagtctcaggatacaaaatcaatgtgcaaaaatcaagcattcctatacaccaataacagataaacagagaaccaaatcgtgagtgaactcccattcacaattgcttcaaagaaaataaaatacctaggaatccaacttacaagggatgtgaaggacctcttcaaggagaactacaaaccactgctcaatgaaataaaagaggatacaaacaaatggaagaacattccatgctcatgggtaggaagaatcaatatcgtgaaaatgggcatattgcccaaggtaatttatagattcaatgccatctccatcaagctaccaatgactttcttcacagaattggaaaaaactaaagttcatgtggaagcaaagaaaagcccacattgccaagtcaatcctaagccaaaagaacaaagctggaggcatcacgctacctgacttcaaactatactacaaggctacataaccaaaacagcaaggtactggtaccaaaacagagatatagaccaatggaacataacagaaccctcagaaataatgctgcatatctacaactatctgatctttgacaaacctgacaaaaagaagaaatggggaaaggattccctatttaataaatggtactgggaaaactggctagccatatgtagaaagctgaaactggatcccttccttacaccttaaacaaaaattaattcaagatggattaaagacttaaaccttagacctaaaaccataaaaaccctagaagaaaacctaggcagtaccattcaggacataggcatgggcaaggacttcatgtctaaaataccaaaagcaatggcaacaaatgccaaaattgacaaatgggatctaattaaactaaagagcttctgcacagcaaaagaaactaccatcagagtgaacaggcaacctacaaaatgggagaaaatttttgcaatctactcatctgacaaagggctaatatccagaatttacaatgaacccaaacaaatttacaacaaaaaaacaaacaaccccatcaacaagtgggcgaaggatatgaacagacacttctcaaaaaaagacacttatgcagcctaaagacacatgaaaaaatgctcaccatcactggccatcagagaaatgcaaatcaaaacaacaatgagataccatctcacgccagttagaatggcgatcattaaaaagccaggaaataacaggtgctggagaggatgtggagaaataggaacacttttacactgttggtgggactgtaaactagttcaaccattgtggaagtcggtgtggcgattcctcagggatctagaactagtattaccatttgacccagccatcgcattactgggtatatacccaaaggattataaatcatgctgctataaagacacatgcacacgtatgtttattgcggcactattcacaatagcaaagacttggaaccaacccaaatgtccaataatgatagactggattaagaaaatgtggcacatatacaccatggaatactatgcagccataaaaaatgatgagttcatgtcctttgtagggacatggatgaagctggaaaccatcattctcagcaaactatcacaaggacaaaaaaccaaacactgtatgttctcactcataggtgggaattgaacaatgagaacacgtggacacaggaaggggaacatcacacaccggggcctgttgtggggtggggggaggggggagggatggcattagtagatatacctaatgttaaatgacgagttaacgggtgcagcacaccaacatggcacatgtatacatatgtaacaaacctgcacgttgtgcacatgtaccctaaaacttaaagtgtaataaaaaaagagaaatttgtaaactttcttagaacattatgagttttttttttttacaattttttttttttagctcatcattctatcgttagtcttagtatattttatctgtggcccaagactattcttcttccactgtgggccagggaagccaaaagattggacacctctggtttacagggtagataatgaatatttctataaaaattgtatttctatgtactaacaatgactaatttaaaattgaaatttaagagtactttttacaagagcatacaacatatacttgagacatataagatttgcaggatatatacactgaaactataaaagattgcggagaaaaattaaagatctaaataaagggagagatatgccacgtttatgggttacaacactcaatattgttaacgttaaaattctcttcaaattgatatacatatattcaatgcaatcccaatcaaaatccacaatacttttattagaaaatgacaactaaattctaaaattcatatggaaatgcgaagaacttagaaaagccaaaaacaaaacaaaataaaaacagaaaaaatttgaaaagaagtacaaagttaaaggaatacattgcctgatttaaagacatagtgtaaaattatgttaaataagactttaaaatattagcaaaaatacagattaaggaagtgcagaaatagaccaacaaatataagatcaaataattttaaagaaaggtgcaaaggcaactcactgaagatcgtgttttaaagaaatgttgttgaatgaactggacatctgtattaaaacaaaaaccaaaaaacaacactgtaaagctgtgaccccaaacctcacatggtatacaatattcaagaactacctcaaaatggattataaacctaaaagtacaaaactttaattaagtaacatgagataatttcttaaatcttggcaaatacttctgagatatgtaccaaaaatatgttcaatcaaaggaaaaataacacattcaactttgtcaacagtaaaattttctgctataggacagactgttaagatgaaggtaaaaaagatccataggctagaagactatactggcaaatcacatatctgaaggaggacttgtattcaatacttattaagaaccctcaaaactcaataataaagaaaagagtttaaatgggcaaaagatttgaacacttaaaagtccaaagaagacagagggatggcagtagtacacataaaaattgtaaacattagtcattagggggatacaaagtaaaatcacagagaaataccactacacaccaaatgagaatggtgaaaattaaacactgaccataccaagtgttggtgaggacatggagttcctgaaatcctcgtaacactgtggagagaatataaaatagtataaccactttggaacacaatttgtcagtttgaaaaaggtaaacatccacttaccctgtaagttggtgtgcttatgcttattttctgtattttatggtgacatctttaaaagtttgctggctctggagagactgcccctcccagggctagccctttcttagagatggcaaaagccttgacccagagcacctctctcatatacagccaaccagtctagagtctacagccccaattacctctttatccaactctcacaccccacgccaatatctctcctgcactaaagcaccccaggaccaagtaccaggtaaccagagaccaaccctgtaggccaaagcctgctgaaattatgcaaactagctaatcacaagctgcttactctgccctgcctggtcttttccatggaaaccccaataaaggctgtggcctatgttttccccttgctcctgcctcctgaccaacactggtgctttccatgtggccctctgtggcacgatgcctttccttctcttggaaaatgtgaatggtgaattatttcaatggcactggcttctctgtgttgtcacttagtcacctgtataaattaacatcccacaggtagaaatgaaacactcagtcctgttactcctaggtattaacatataagaaagactagtacatgaatgttgatagcagctttatttgtaatagccccaaactagaagcaatccaaatgtcctttaacaaatgagcagcaaaattgtggagtatctatataaagctatacacgagtctgtaataaaacaatgaagtgttgacacatgcaacatggaggaatctcaaaataattatgctgagtgagaaaaaagcaaaaaacagcattttgttattccatttatgtaaagttttagaaaaagaaaataagtctacagcaaaagacagtaaatcaatgtttgtggcaatggggtgccagggagggagggaaagagggattttaaagggggctgagatgactttgcaggtgatgaatctgctcattatcatgattatggagatggtttcctgggtgtacacattagataacacttaatacatttacattttaaatatgcacagtttactgcgcaacaatatctcaatagagctttaaaaaatggctccacataaaaaatctgggtctcctgcttctcttgaaaaaccagaaaatttagtacatatataagggactccataactattctcattctttggaagggacagccctgcttcaatgggagcaaagactagcgagcaataaagcttgtttgtgagtcacagaagtcacatgcctagactctgatctctcctctctgtcccgtttcttgcttgtgtagcaatggcctagaggtgaacagccacaacagcctcagcaatccagaacacattcagattatttgctctgccattgaccttgtgcacaggagactaaatctggaagtcctgaaaatatctgtgtaccctcatgcctcacagctatagcacactctggaagcatgtttagatggggcacataccctctattttgttgccctgagctctatgaatcacatgcagtatgtgaatgtaattatggtggtctgcaatggcctcagcccactcatgatttcctccagggaagcggagggagtacagaggtctgccttcactgagcaccctgggtaacctaaggtacacttgccagctggtagaggtgaaatggcttctcccacaggtactggcagtgacagaactcaggtaagagccttgggcaggttagaaagtgcaatgcaactcctgaaagcttcccacctacctggcactcacacggaatctctccagcatggatgtccagatgtgagattaacttttggctgattgatagctactacacaaagctactttcagagcttctgtccggtgtcacccactatgtggaccaagcagacagcatcctccctgcgttccaaggccttcctccagggtgaactttctggcaccacataggctgttggtttaagccttttctccagtgtgattttttttttatatttaatgaggttggacttgtggctaaataatttcctacattcactacactcataaggtctttttctagtatggactctcaggtgttgaacaagtatagatttaacgctgaaggctttcccacattcgctgcacacatagggcctttcaccagtgtgaactctctggtgtaaaatgaggctggatctttggctaaaagatttcccacattctgtgcactcacagcctttcaccagtgtgaactctctgatgtgcagtaaggccagagatttggctaaaaaccttcccacattcagtgcacttataaggcctttctccagtgtggattctccaatgccgagcaagtgtgattttgcagctgaagcatttcccacattcactacacttataaggctttgccccagtgtgaattctctggtgttcaataaggccatagctttgtctaaaggatttcccacattcactgcattcataaggcctggctccactgggaactctcgggtgtataatcatgctggaattctggctaaataatttcgcacatttgctgcactccagtgtggactttctccagtgtggactctctggtgctgaatgagtgtgtgtttgctgctataggctttcccacattcactgcatctgtaagccctttctccagtgtgaaggtttttatgcctaacaaggtgggtgcttctgctgtaggcttttccacattcactgcacccataaggcctctctccagcgtgaactttcttgtgttgaacaagatgggagctttttctgtaggctttcccacattcgctgcacccgtaaggctttaaacccatgtgaactctctggtgtacagtaaggctagagttatgactgaagaatttcccacattcactgcatttgtaaggtctttctctgctgtggactctctggtgctcacaaagcctatttctgtggctaaaggctttcccacattcactgcacctgtgatacccttctccaatgtgaaaggcctccttgcactcagtatttctgggtgaattctgggtctggtactggagaaggcctgacctgggcaggaggtccttctcacagtacccacatgtgaagggattcactgacatgtagactctgcagttcttaacaaagccctatccttatctctgctgaggcatttctctccactgtgctgcctctggtgctagggggtgtctgtactgacccagaattgtctcccacatgccccccgtgtgtgcagtttgtgcccggggtgtattccctgatgctcagccaagagcaaaatgtctttcatgattggaccacaaatcccacaaggggaggctttctgggcagctggacctgccttaggagccctgacctgtgacactccttgagaagatggctcctcatcctccattagaaaccaacaacctgaaagcaaagaaatattgaagtatacatacagcctggtgggatctactgggttcattgcaagactcctggtctaggactgactttcgtgggagaggcagccctatcacagtgtgtgtcttacaaatgcaggaacaagtacacaggactcttggggggctacgggggttacaggtgacaaagagtctactgtgctaagcctggcatcatgatacaatggggaggtctagggaggagcaagggcacagcgatgggatgcagcccaggaaggagaggctgcatctccctctcacttctctgcaatggcttttagcaggagcttgtctgctggtgacacaggagcactgaacaaaagggtgtgtccagactcaggaaaaccaactgcaactgagtagctgttcaagaactacttaggctatgtgaacatctcacaaaacattatgtgtagctcagggttagagaacactgcagagggaacagtggaaaggaaggggtgagacctggaaatcagagaggtgggagtcggccctggccagattcagtgtaggaaagagaaatgggcaaaatgtcaagaatgcaaaacatagaaaagagttatggcccctgcccttggtataaaaacaatgatggacactggcaaggttgctggaatcatgagaactcagccctgacgttaagccatccctcacttcccacttaccagagccagtccccgccagagtccctcctcccatagctttgtcaggcatccatgtctcttcctccagccccaagtggacaactacctgagtctgggaagatgcaaggcctaagggaaagacacgacaggtgagtggacagcaggagcgcagagtaacccaccccatgacagaccccaggaaagaaaactagtattacaaaaagagcctcagaagaagatcccataggaacagcccagtggtccctgaaaatagtaaccacattggtcctgcaattcccagcacagtgaggcatgaggaaatgccaccaggagggaagggggcagaattgggggcagagaggtacaatgattctgcatagtcactctgccagggcgaggccaagcctggtgggatctattgggttcactgcaagactcctggcccccatctccttccctgcaaggccttagggcaccaggtagtggggctgcctggggaggggacagagaatgcactcagtccagccctggcacccacagcatctatgcaagaaaagctaggaagggagcaatgtccacagcctggctgtgggaaggaaacagcagctcctggaaaaaagcggaagcaaagagcccagcctgggatgctgaggtatgagggacttacccagcgaggccacaagtgcaaagttctccagcatcacatcgcagacagacaccgggtccatcgtgagtccctcgagcttcaattcttaaaagtgctacactccacaactcatcatgagacaggcaaaatcataaaaaaaaaatggctgggtgatttttctaaaattgctaaaatggttgataataaatattttgtgttatttatttatatggtttttattttttcctgatcagatctataaggcaaaaactctctctagagaggaaaataatgaatgtttggtttgtcaaacccgtaattctggaaaggcaattaaaatttcaggtgggaatacaccacccgatgggctatttaaaaattgacagatggatttctctcaattgccaacttcaatggcatatcagtatgttctcttaagagtttgaatgttttctggttgggtagaggtaggtaagctgaggctgtgacagtagtttaaaaagtcattagaaagttattagaaaatgtgtttccttgctggggcatccctggagaaatccccagtgataaagggagaccattttacttgacaagttataaagtagttatataacataagatgtcatggacacagtggcattaacactgtccttatcaccctcagtcttctggaaaggtcaaaaggacaaatggcattttgaaactgaaattgggctgggtgcagtggctcacgcctgcaatcccagcacttttggaagctgaggtgggcagatcacttgaggtcaggagttcgagaccagcctggccaacatggcaaaaccccatctctactaaaaatacaaaaaattagcctgtggtgcatgcctgtaatcccagctactctggaggctgaagcaggagaattgcttgaatccaggaggtgaaggttgcagtgagccaagattgcgtcactgcactccagcctggatgacagaggaagatcctgtctccaaaacaaaaaaaaaaaggaacacccatccccccccaaaaaaacaaacaatgacaacaacaaaaacaaaaacaaaaacaaaactgaaatcggcaaagctcattgaattgattatatttccacggccaactgtattaccattggccttgatagcaatcagattcatccccaccagaaagcataaattggcccctgataaaatagtcactggaaagtttatgcccctaataatagaatttcactctcttaaactctgatatgactaaatacttcaaaggtttaatgccaaaatatattatcaccaggtaaaggaagcttttcatgatccaccaatgagaacaatcaagccctgcatgatttggaatctggagattgggtcttctggaaatgatatcagaggaagattgcccttaaaccccaataaaagggaccatatcaagttcttcttcccacccaaattgcagtaaaacttcagggttgcaaaccttagatctacatcacacaattcaaagggacctctgcagactcttgaagtttttctccagaagcagacagcatcttacatatgtacagctctcctaagaccatgggccaagacttacctccatcctgaaagccgtatccttttactttttttcccctaattttcttctgccccaattatttccttttccttacaggaaaatccatgggaccataatctgtggatagctttacctaaggcttattctgtagcaaaaaacttgagtaatccttgggcttgtgggttaatgccaaaaactcaagaagcaatttcacaaatgccaatgcctccctgtgttcccaattcaccctgacgctccaaaggaagaacagaaagctatcttgatattctagacatcactaccacttgttttcctacacttgctggaaacaatatcctaacctttccaattagtaacctaatcactaccaaatatagaaaacacattcgagtgatgcctgcaaaagatgtattatgcttccaggcatcacatactcaagatctggggactatgtatgcaggctattcgtgcatagtatcataagtaattgctatataatgtcaccagaacaaatccagtagggtccttcttcatgtggttatacaccttaacagcatgctgtaaagggaccacaaagaattttcccactgaactttgttcaggagccatcaggcttacaggtcaaatttaacttacttctgctcaaacaccaccaggaggcgctcttttccaatgcttgaggacctatcttgggtccgcagagaatttgcttaccctttcttcctcttcactggtttagatcttgctctttgatgggtctcactcctgccttttgaatagcttcctctgacagttcccataataccttccataatcagaggccaaaacagtaaacaaaatgatcatcggccttgaaagagactaagataagctagtttctactgaggaaaggttccagtggggttcctgagggcttgctcttggtggtagtagggtgctggtagtgtggaattcagaacagatccataaattggggaaaatcttggactttatggccaaccaaaccttccagtggttcagtagaagccaccctccaaaaggtagatgataacctatgcatctaacaaaacacttaatagaatatcatgcagcttaatttatttgagataaggtcttgctgtgtcacccaggtgggaatacagtggggctcactgcagcctcgacctcctggactcaagggatccccccacctcagcctcctgagtatctgggatcacaggtgtgcaccagacctggctaatttttaatttctctttttttttttaaatagagacagggtctccctatgttgcccaggctggtctcaaactcctgggctcaagtgatcctctcatcttggcctcccaaagtactgggattacaggtgtgagcccctgcacccagcctcatgcagctttacatcattttgatcatgttggggacttgtgctgaatcaaactgagtgctgtatctacacttcccctgattttgctactatggaaagcttaatttaaaaggtggctatttctttagatacttttatcaaatacatgaagaaaatttcaatagatgaagaaaaaaaattttttttaactctggtaaaatatacatagcatgaagttaatcattttaactatgttaagtgtatagttcagtggcattaagtacattcacgatgttgtgccaccatcaccactatcgatgtccaaaacttttcatgaatggcaagcttagcttttccagggtttttgaatctttatgtttttttctggtgggtctccaggttactatgacttacagtaccaggctaatgacataaactgatacctctttattattatttttttccagatgtgaaattataaatgcagggacttagagctcatacaactttaaaaaggttgggaaagtgaagttatcaccacttggttatatctcctaaggaaactaatttgaggtctccccttctcaatttttccttctttataggtactattaatgccctagcccagcaacctgacttattattgaatatattcggggtgtgatggtgaatacttaatcaccatcacaccccaaacaaagattatgaccaattggactcaaatactattgagctgcttatatgcctggactttgacttgtttggttttgactggttttgttcatagggcctcctgtgaaggagtacactttggtctcttggtattattttctggtagtcatcgtaatagtccccctggtgcactgtatcctgtcaaatcttaaatgtgtgtatgcagacatccattgtgcactgaatggtctccctttggctagatcagcaagaatacaattatttaactgatctgacatcatgacttgtgaattccgtgctgaggccaagtaagtctaatacaatggtgacagacagtgtcaatgcccagggttttggtcactatgtcaaaatccaatggctgacccaaagtggggaattggcaaattgaactaaatttggcctgaggctgtctccatatcttgagtcctcgtggagctggtttggagtttcgttttggaatttggtagcggaaggtcaaggtcgtttgccagatggctataacttctctttatgctcaaagatcttgacagtatgtaaattgggtgatcaccttttctatttctagttttggttgatcttctgttaggtttgaccaactcttggcccctcttatgtcgactaaaactcctgcagctgcagaaagtcaagttccagcactagaaacaaggaccagttaagagaaatcattttaccccaaaaatatatttctttgacatattttgaagggaccctgctagatctttcctagtctagatctaggaaagattagctaaaggtcttcattctgaaggctcccatatgtacacattaaataaatttgaatgccatttcttctaaaaatcaatcttcctcatgtcagtgatttacagtaaacctttcaggggctaagagccttgtccccacagttttggtgcagcaagcagggtctccaatgccactctgctgttttggaagctgcagtgaagggaacccaggaagctgacaagctggcaaaaagggtaaaaacttcttacccgacaggcttccagcctctctttctgtgcaatttagttgagcagacgataaaagatcagttctgtctcaaaggattttgtttttcttttctataaaggcaaagggctagtgggagatcctcagtgtcctcagtatcactggggactcctgcaatgctacccacaggagagcccctccacccttgtgggccctaaaactaacatagggagctgctgaaagattgtaccatggcacatatgtgaggttttcttcaaaacagattgtgttgcaggaactgaaacaccaccaaaaacaatcccattaaatgtgggcaaaggggccgggcctggtggctcacacctgtaagcccagcactttgggaggccaaggcaggtgactcacgaggtcaggagttcaagactagcctggccaacatggtgaaaccctgtctctactaaaaatacaaaaaaattagccgggcatggtggcgggtccttgtaatcccagctacttgagaggctgaggcagggaattgcttgaacccaggaggtggaggttgcagtgagtcgagatcgtgccactgcactccagcctgggcgacagagcaagactccgtctcaaaaaaaaaaaaaaaaaaaaaaaaagtgggcaaaggacatgaaccaacatctctctaaagatgacatacaaatgaccaacacgtatatgaaaaaatgctcagaatcacaaattatcagagaaatacaaataaaaaacaatgcaatatcacttcacccaagttagaatggctgttattaaaaggacaaaaaccaacagacgctagtgaggatatggagaaaaatgaactcttagatactattggtgggaatgtaaattagcacagtcactatggaaaacagtatggacatttctcagaaaactaaaactaaaactatcatacaatccagcaatcccagtaccggttatctatccgaaaaggaggaagtcagtctatcaaagggattcctgcacttgtatgtttatcacagcactgttcacaatagccaagatactcattcaacctaagtgtccatcagtgggtgaatggataaagaaaatgtggtacatatacacaatggaatactatccctatattattactataaaaaagagtgaaatcatgtcttttgcagcaacatgaatggaactggagaaaattatgttatttgaaataacccaggcatagaaagacaaataccacatgcactcaatcatgtgtgggagctagaaaagttgacctcataaaggtagagagtagaaggatagacactacaggctgggaagggtgtgggtggggggagatgaagagagggaggttaacgcatgaaagcctacagttagataaaaggcataagttccatcattcgatagcagaatagagtgaccataactaacaaccaaacattgtgtatttcaaagtagctggaagggaggacttgaattgttcccaatgcatagaaatgataaatactccaagcgatggacccttcaaataccctgaccttatcattacacattctatgcctgtaacaaaatacctcatgtactccataaacatggaaaatattatgtatcaattaaaaaaaactattcctagaatgatggtaaaaggagaacattagacaatttctgttcaatgaggatagtccaaatttgagtaaaagtttcaaaaaaatattaatttaaggagaaaaattggtagaacacctgatgaagataaagatggacaatgtgaggtctaaatatccacaagaagtcagaaagttaagcagaaaaaaaaaagaagacaattactttctacagaaaaagaaaaaaggctgtacaagaaggtaggaaaggtaattacagtgtactatatatcccatctgtgaataacatttatacctttatgagtatatcaacaacagaagatttgtgatttgtgatttatgatttgtgattatatcaacaaccaaagttttgcagaactctattgggatgatgggtaacgtggcatacgagcagacagataactaaatcttccacttcatctgcaatattggaaagtcaacagatagtgcctaaaataaaaattttgtttgtagaggcagggtctcactatgttgcccaagatggtctcaaacttttggcctcaagagatcctcctgcctcagcctcccaaagcactgggattactggtgagtgccaccttgcccagccccagccttgtttttttgtttttttttttgtttttttttttttactctggtaaaatatacatagcatgaagttaaatcattttaactttaagtgtaaagttcagtggcattaagtaaattctcaatgttgtgccaccatcaccactatcgatgtccaaaactttttcatcatttcaaacaaaaattctgtacccatcaagaaataactccccaggctctgccctgcccccttgtaacctctcttctacttttgttttatagagttagttgcttattctgggtaactcatataagtgaaaccataccacatttgtccttttgcgtctggcttatttcacttcgttttatttcttaagtgtcagccatgtcacacatatagaaaaagttcatctttttcgccaaattatattaatatatcacatgtattcatttatgtgctgacggacacttaggacatttccatggactcacataatttgatgcaagtagaaacatttataattaacacaatattttatgaaaggctcatatgtaataagtactattaactgagtgcccactttgcagaacctgtgtgaggggctttatataaactgaagcacaacgagcttgggaggtgggaattgctgtcagtttcacagatgagcaagctgagtttctgtgtcttcagagctgaaagtgcctcacccaagtgtgcagtccagagcctgtgctccttccactgcacgcccaggtgtcgctcatgaacacagacacagggagaaacacacacacgaacccagatgtctacccagaaatatcttcgtgaagggacaataaacgcacaggcaaacattcagacaaactcacttagcaaatgtttgttgagcctggactcggtggcagattctgatctaggggatgccaggtgcagatacatttgccaagacacagggtcatgccccaggggctcctgggcacacatgcacacacagacctgcgcgctcacaccacagtgctcagcccgttcccaatcccaggacactccagggaggacagagactgtcacgccaacacccaacccctcccactgcaggctgagctgagttcctgatatgctgccagcccaacagcatagccaagggccctgggtctctctgcagacctgccctgaccccacttatgtgcatacacagacacacagacacacacagacacacacagacacagacacacacacacacacacacacacacacacacgaaggtgtgtgtcagttgtccagatacacataaagctcatccatggccaagtccctgcctctgcctgctgggaccagactccactgtcatgaggatgacacccaccgcctgtgctcttctgctggctctaatctgcagcgtccagctgggtgagaaagaagcgggcagggctgagaggaaacaggtggccctgctccttcaccgtcattgccatcccagggtctcagctgtcactattgcagacatttgccaggggaggtttcagtgaattctgacctctgctgctttcttatcttgcctcatccaccacaggggatgcctgcctggatttctataagttgtttgggagagttgcttttgcatacccagaggacctgaagcgggagcttgctcaatacaaccccagccccctgacagaggagtccttcctcaagttctagcaatgctttgcctctgtttcattcccagaaagccttgctgttgttggaatatggtaagtgtgccctggggaacctgcacatgctgcacagccacaagtcccaggccttatgccctgcacttaccttcccttcctgcttgccatatcctgagcaggaagccacatcccaggatgctcatgatcagatgaaggtgcccacaggcctcaacagggcctcctgcctcacctttttcagccctgaacccagacactgcaaccctgcaaggggagaacctctgcccctggtgcccgggagaggcccagggacacagggaaccacaatcactacatcaatgcactgatgatgagcacacagcaacacacactcacacaggatgctgttaacagcaacacacacactccatgcctgcacaggcacatgcatacacgtgtgttacaccaacacatgcagagtcacactcaagcaggagtcacaacccacactcactgtgtttgtccagagcctgggatccccaagaaatggacagaccttaaggagctcctctgacctctgggactgggtgttaatgatgggtctggggatgctttcacagaggctcccaggtccccactttatttctttcccaacagtctaggatcgttgtcagcgatgactgcaaagatgtgtagatacttccttctgatctgaggacccctgcaacccacctggccctcccttcctcagggctccccacactcctggcctgactctatccatcaacaaacaatccccagtaaacacctgcagctcagctctgtattctggcgtctctgtggggttggctgtgaccacatatgcagtgtgtgaccagggtctgcctgcgaaattacgtgactgaggaagaactcaacaggaatgtgtacacatgtgtgttttctgagcccaggaaatcaaccctaacacaatcctccatctcctcctacccaagtcctccttctctctacccccagcacaaccccaccccgccttgacccaaccccccaggactccagatgctggaggctgggaaaccttgccctcctggctgagtcacaggcctcagcgtccccataaatacctgcagctcagctctgctcctcgggctgttgggaccaggcaatctgcatgaagccatgggggtctctgtggccatgtgaccatgacaggggacactgaggtcacagggaacgagcaccactctcaggcatggtgcctctgtcccacctcacccttcagttgatttcgtcctcgctggaggtctcagtggccttcaatgcattgacaaggctccaccaactccctctggggaaggtccctccccaaacctcaggccctttctgcaggctccttggatctcctgggcaatggccacctgtgcccatcagcccacactgccctaaactcctctgtctccctcccagactctcactgccccaaatatcctttctcctctccactcattctttttgttacctctcagctgtcatttcctcccgggtcagacatttctggcccccatctcaggccacgtcttctcgcctttgtccccagaattgccttcacttaacacactgtctgccccagtcatcacccatgcactcagccagggaaggagtgtctcctgccacaggtcaggccttttcccagagccggacaccccatgaagaacaaggcagatgagggcgctgcttccctgaagttcacatccaaggtgaagagggggttgtaaagctgaagaaaattgtaatagtgatgagaaccacaaggaccacccaacagggaaatgtgatcgggtgggactggcttggggtgccacattgggtcaggtggtcccagaaggcacgtgaggagacatctcccgagtcctgaataacctgaggcagccaccaggtgaaggtctggggcagagaatgcagcatgatgagaaagggtttagtgtgtcggagaaatggccagtgtacctggaacaaggggcagtggggaagggggtcacgttgggctggagcagctgggtggatgcgatgccactcctgagaggtgaagcctggggagaagcaggtttagggcaaagatccggaatcccacactggcctggataagtttccaatcaagatatccattagccatccaggaggatgagacacagaaactgtgagacacgctagtttggagctcatgggagactcaggcctggagacaaaaatatatgctttcaacatgtaggtggaatttaaatccatggagataaagacaagaataaatctcatgttatttaattcagacacacataacattcagcttttaacgatcaaaggccacgagtttcaactataagttaatgaaaacagttaaaaatgtcctgagaaattttggacaaagaagctgttgatgtaagttctctgaggatgcaaaagcatttcacatgtgtttgaaagaataaggaaaatgttagagaatatttgtctggttaccatgagtctacccataatctgtaagttgtcatgaaattgaataatttcttaaaattacaatgtcctttaatcaaaacatatttattgccaagctatgctttttaaattaattttgttcatatttatctagatggcaaatccacagaatatattatgttaaattatgatctttgtattaacgttaaaattttgtgatgtgtctttttccttttttccacagttttaatatattactctttaatatttttaaacttcatacttttttggttattaaaatgaattttttaaatgcaaaaagaacatgttgcattatttattttagaaattcccctctttgtgttggactgcaaattcagtttctctttggattgttcttttttattttatgatttattttatttatttatttatttattttgagacggagtcttgctttgtcgcccaggctggagtgcagtggtgcgatctcaactcactgcaacctccggctcccgggttcaagcgattctcctgcctcagcctcccaagtagctgggattacaggcatgtgccaccacacccagctgattttttgtatctttctttagtagagacagggtttcaccatgttggccaggctggtcttgaactcctgacctcgtgatccgcccacctcggcctcccaaagtgctgggattacagacgtgagccactgtgcccagcctggatctttcacaactaggactgacactgtatgtaaaagttccggaacagtacagaaggtaaacagtttttatgtataacttcaaaaagggaaggaaaaaagagagaaatcctttgacttccacgtgcccatctcaagacattccactcacagatttgaggctctgggttctgggtttggagtttcagtgttaacctgaacagaactgacacacacacataaagatgagtgtaatgtgtaattattattcctcttgctggtcaccaccatcactttcgatttctctttttttgtgtgaatttacttaaaagaaaaaaaaactttttgcaataactatttggagtttaaaaatcaataaaccggccaggtgtggttgcttatgcttgtaatcccagcactttgggaggcagagatgggtgaatcatttgaggtcaggagttcgagaccagcctgaccaacatggtgaaaccccgtctccactaaaaataccaaaaaaattttagctgggtgtggtggcaggtgcttgtaacctccgctactcgggaggctgaagcaggagaatcacttgaacctaggagctgaacaggcagacccagcctgatgcccttgggacctgatcccactgccctcttcctgtgcaccccagctttccactctgttgtgccccaatctgtcaagtttctttttgtctctgatctctgctagggtgattccaatgcctgaccatctgttcttcttcttcaagtcaagggtgaaccctcagccccaccatttcctcttcctccactcctaagtcatcccctaagtgtcctgagggcaataaccggggcgtaaatgccctatgtgtctccagcatgggctctgcatgacttcactagacactgagtcacactggttgaggtcagaggacagaaaatctagcgagagagggactggagcaagaggtggagcgtctgacccttgtggggtggttcagctgctggggctgagcataccggagacctggaaactcaccaggcctgacatttacctttctgctttaatcccaagaaacctatggagattggggatcttccagccgagccaacggcaaagatgaggatttcctggtgccccttggccaaacctcctgctcacctggctgagcctgactcataccagtatgtggacctgtggtgtgggtggcagccacatcactgcggaattgggcttcatccagggttgattttccatggttagatttttcctcataacagtagaggctgttatgaacaatatgacaacaaattagaacacctagcaaaaatgtataaattcctggaaaaatataacctaccgggattgagccgaaaagaaatcaaactcctgaacagaccaattacaagtcagaaattaaatctgtaataaaatatctcctatcacagaaaagtctagattccaatggcttcattgcagaactcaaccaaacgtttaggaagaaataacagcaattcttcctaaactcttcctgaaaattgaagagtacggaattcttccaaattcattttacaagaccaacattatcctgataccaaaaccagagaagcacacacaacaacagaaaactataggccaatatccatgataaacacagatgcaaacattctccacaaaatactagccaaccaaattcagcagtacattaaagtaatcattccccatgaccaagtgggattcaacccagggatgcaagaatgtttccagatacacaaatcaataaaagcaacacactacaccaacagaatgagtacaagaagcatatgatcatctcattaggtgtggaaaaagcatgataaaattcaatagtccttaatggtaaaaactcttaacaaactgtgtatagaaggaatgtagcccaacacagtaaatcaatgtatggcaaacccacagccaacatcatagtgaatagggagaagtacaaagctcttcctctgagatctggaacaaggcaagaatgtccactttcaccacttttattcaatatagtactggaagtcctagccagagtgattaggcaagaagaaataaagggcatccagactggaaagaaggatgtcaaattgtctctgcttgcagaggacacgatcttatgtacagaaaacccctaaagcaccaccaaaaatctcttagaaagaaaacccctaaagcaccaccaaaaaaactcttagaactgatcaacgaattcattaaagatgaaggatacaaaatcaacgtattaaaagcagtaccattcctggacatcaacaacaaattagaaaagaaatcgagaaagcaatcttatatgaaatagctattaaaaaaagaaatgcttcagaataaatttaacaaagaaggtagaagacctctaccaaaacaactataaaatactgaggaaatcaattgaagaagacaccaaaaaatgaaaacatatcccatgttcataattagaaggatcactattgtgaaaatgaccatgttaccaaaagtgatctgcagattcaatgaaattcctatcaaaatatcaatgatatcttcacagaaatagaaaaaataatcctaaaatttatatgaaactacaaaagactctgagtggccaaagcaatcctgagcaaacaaaacaaagctgaaagcatggcataacttgacttcaaaatagactacaaagctatagtaaacaaaacagcatggtacttgcataaaaacagacacatagaccagtgaaactaaatagataactcagaaacacatccagctgtttacaaccaagtgattttcaacaaaggcaccaagaacatttactggtgaatggacagtctcttcagtcaatggtgcctgaaaaactggatatccgtatgccaaaaaaaatgaaactagacccctatctctcattatattgataaaatcaactcgaaatagtttacagacttaaaagctgaaactatgaaactgcttgaagaaaacataggggaaatactacaatactgatctgggcaaagagtgtatagtgaagaacccaaaagcacaggcaacaaaagcaaaaataggataactggattatattaaactaaaaagctattgcacagcaaatgaaacaatcaacagagagaagagacaacttgcagagaagagacaacttgcagaatggccaaaaaaattgtaaactattcattcaacaagggattaagatccagaatacacaagaaactcaaacaattcaatgtcaagaagaaaaactacaagtaatctgatgtaaaaatggataaattagctgaataaacatctctcataagatgacacatacatatggccaacaggtatttttagatgagatctggcacgttcagggtggtatggccatagacaccaacaggtatttttaaaatgctcaacatcactcatcatcaggaaaatgccaatcaaaaccacattcagatatcacctcaccccagttagaatggctactatgaaaaagacaaaagataccaaacgctggtgaggaagcaaagaagagggaactctggtgtgctgttggtgggaatgtaaattagaacagttattatgaaaaacagtatgagggttcctcaaaaactaaaaatagatttaccatatgatcaagaatcccattactgggtacacatccaggcaaaaggaaatcagtatatcaaagagatatctgcactctcatgtttattgcagcactgttcacaatggacaaaacatggaatcgacttaagtgtccatgaacacgtgaacagatgaaaaaaaatgtggtatacatacacaatgaaataggatttagctatgaaaaagaataaaatgctgtcatttgcagcaacatggatgagcttggagtcattgttttaagcaaaagaagccaggtacagaaggatgaatcctatgtgttctcactcacatgtggaagtaaaaaagctgctctcatagaagaagagtgtagaataatggttacttgaggcaggaagtagttgggggaggtgggactatagccaaaagttgatggatggatacaaaagtgcagctagataggaagactaacttctagtgttctataggattgtagggtgagtgtaatatacaatttattgtatattttcaaatacctagaagagcagatactgcatgttcccaatacgaagtaatgatcaatgtttgaggaggtgtatatgctaatcaccctgctttggtcattacacattgtatgcatgtattgaaataccactgtaacccataaatatatacaattattactgcatccatttaaaataataataaaagcaaaagaagaaaagaaaaaaagctacagtctaatatccacaattaaatcttcaataacatagtagaaaaccaagttcaacacacattaacagaattatacaatatgaccaagtagactttatccctgaaataaaagaatagttcaacacatgccaatgaatcaatatgacattccacattaacaaaataaagaataaaaaccacaggatcaccttaaaagatgcagagaaagcacttgataatattcaatatccattcatactgaaaccatcaccaaaatagatactgaaggaacttacctcaacacaaatatggtaatatataaaaacccactgctaacatcataatcaataaagagaaattgaaatcatttcctctaagatcaggaacaagatgaggatgcctactcgtaccactcgtatttaacatggtactggaagtcccacccagagcaacgaggcaagaaaaaaaaagccatctaaatcagaaaaaaaagaagtaaaactttatctcttagaagatcacatgatgttggttgtgagatgtgttcattattttgattattatggtagttgttctgatttttacaagtgtcaaaagttacaaattatatactttagacaaacatacttgttatatgtaaaatatatttcaataaagctattaaaacaaaaaaattaatttaataaacatatacaagattttaaaataaaattagaatcaacttaataggttaatgaagagagaaacatcaaaaagaaacatttagttaatactttaaatgatactatttaaagctcaacttccccaaaactcaactgtttatgtaaagctaatgagagaccatcaggctaggatagaggagccttaatttggccaaagtacaaacaaaagttacaaattatacactttagataaacatacttgttacaggtcaattatatgttaataaagctattaaaacaaaaaattaaatttaacaaacatattaaataattgccagcaattattctggcagtcacacagatatgcaacttctccagttacttctgcagataccatcactattttagaacctgagattggccttttgagaagtcttttcaggtttttttgtatgtctaacaccaatggctccacctagattcaccagctgttcctgtggccccacccagaaggaactgcatgcaaaaagacagcttcaactctctatgaattcatctccaatccaagaaatcagcactccacataccctagcccccagcccaccaagagtctttgaaaaacccctagcctctgggccttcaatgagatcactttgatgttaactctgtttcccccatggcatggccagcctcccatcaattaaaccctctgcaatgccacggtctccctgaattgatttgtttgtgcagcaggcaggaagaatccttcgggcacttacaccactccaatcttatgtaaattcttccaaagaataaacaatgagggtacattctctgtaccaatcagtgtccctgcaggaaggaaatggcacactcatgcaggacataggacaagagtttaatgaatggctgtaaacaaaaaataaaattctaaggcccccaaccatctgaatggacccctcctcttggccaatggcattccaaagttaacctgaaaaactagttcaggtgaagatggaaggaggagtcagacctgcctcattatacccaattcccttttggaattcaggaaaagctgaccaaggtttaacatcaacacagaccttaagtctgataagaaacatttacaaatctattcgttctgaagcctgctacctggaggcttaatctgcaggataaaaccttggtctccacaaacccttaccacaacccaggcattcctttttattgacaataactctttgaaccaattgccaatcagaaaaattttaaaactacctaagacctggatgcccccccaaccccacttcaagttgtcctcttgcccttccagatggaaccaatgtaaatcttacacgcactgattgatgtattatgtctccctaaagtgtgtaagagcaagctgtactctgaccaccttgggcacatgtcatcaggacctcctgaatctatgtcatgggcagatccttagccttcgaaaaatattttctaagttgattgagacctctctcagataccttctggttcacaggcttatggctgtgctgtgagcaaagttaagggaaaccaataagaaaagtgagaaacccaaggcaagcaagagcaacatatctaacgagaggcaaggaaaaggagccatttctacaatccagtaagacatgtaactgcaggagaggccaaggtcacaggaggaatgcagccactgccaaactgtagccctgaaaaaaaccaaagggcaacattgcccaacaatgcaatccagaaaagatcaggtcctggggtacaaagcaggctatggaatgaagactaaccctgttggaataaatatacatcacctctacatcccccaattcataatgagctggtatcatgttgacaccaaaatccaaccactcaaggacatagacaaaatgttctatgcaagatattggcaaagtgaatgaaattacatataaagaaaactatatgctgattaaggaggatttacaccagcaacgcacggtaggtttcaaattacaaaattatttgatgtaatttaacacattcagagcctaagggaaaaaactgtatgcatatttcattaaatgcaagtgagatatgttataaaattcatcttttcttgatttaaaaaattcctttacagagggtgcagtggctcatgcctatagttccagcacgctgggaggccgaggtgggcagatcacttgagccaggagttcaagaccatgttgggcaatatggcaaaatgttgtctctacaaaaattacaaaaattagccagatgtggtggcacccacctaaaatcccagctactcgggaggctgaggtgggaggatcgcttaagcccaggaggatgaggctgcagtgagccatgactgcaccactgcacttcagcccaggtaacaaagcacaaccttgtctcaaagaaaatttaaaaattctcttagaaaatagaagtagcataatatatcttaatctaatgaagaccacctacgaaaaaaatctgatgttaaacttcttatgtaatggtgaaatatcaaaagctatcctttagaatctgaacgaagggtaaccagaaatacttttaaaatgttgtataactttcttataagcctaaaattatgtgaaatttaacaatttatgtaagataaaatgctatcaagagcaaaagaaagaaacaagcaaaaaagaaattcatcttgagttcagatactaaacaaaaatgcctactttcaccattgctatctaacattgtactagagattctacaagtggaataaagcaagacaagtaaaatatatgaagattgaggaggaaaaagcaaatatgcattagatatatttatataaataatcttagagcatctacagagaatatattaaagagtttttgaatgctgaatacgaaacaatatagaataattatacttttctatatggcagcacgaacatttataaactgacactttaagagaatgcaatatttacagtggcattaaaaagaacagataccttggaataaatcaattaatacatgtataagagcaccatagaaatacatatgtattaccaacattaaccttaaatgtaaatgggctaaatgctccaattaaaacatagactggcaaattggataaagagtcaagacccatcagtgtgctgtattcaggagacccatctcatgtgaaaagatgcacataggctcaaaataaagggatggaggaagatctaccaagcaaatggaaagcaaaaaaaagcaggggttgcaatcctagtctctgataaaacacactttaaaccaacaaagatcaaaagagacaaagaaggccactacataatggtaaagggatcaattcaacaagaagagctaactatcctaaatatatatgcacccaatgcaggagcacccagactcataaagcaagtccttagagacctacaaagagacttagactcccacaccataataatgggagactttaacaccccactgtcagtattagatcaatggagagaagattaacaaggatatccaggacttgaactcagctctgcaccaagcggacctaatagacatctacagaaatctacactccaaatcaacagaatatacattcttctcagcaccacatcgcacttattctaaaattgaccacataattggaagcaaaacactcctcagcaaaggtaaaagaacagaaatcacaacaaactgtctctcagaccaaagtgcaatcaaattagaactcaggattaagaaactcactcaaaactgcacaaatacatggaaactgaacaacctgctactgaatgactactgggtaaataacaaaattaaggcaaaaataaagatcttctttgaaaccaatgagaacaaagagacaacataccagaatctctgggacacatttaaagcagtgtgtagagggaaatttatagcactaaatgcccacaagagaaaggaggagagatctaaaatcgacaccctaacatcacaattaaaagaacgagagattcaagagcaaacaaattcaaagactagcagaatgcaagaaataactaagatcagagcagaactgaaggagatagagatacaaaaaaacccttcaaaaaaaatcaatgaatccaggagctggttttttgacaagatcaacaaaatagatagactgctagcaagactaataaacaagaaaagagagaagaatcaaatagatgcaataaaaaaatgataaaggggatatcaccactgatcccacagaaatataaactaccatcagagaacactataaacacctctacacaaataaactagtaaatctagaagaaatggataaattcctggacacatacgctctcccaagactaaaccaggaagaagttgaatctctgaatagaccaataacaggttctgaaattgaggcaataattaatagtctgccaaccaaaaaaagtccaggatcagatggattcacagccgaattctaccagaggtacaaagaggagctggtaccattccttctgaaactattccaatcaacagaaaaagagggaatcctccctaactcagtttatgaggccagcatcatcctgataccaaagcctggcagagacacaacaacaacaacaacaacaacaaaaaaaaaaaaaaaaaaaaaagagagagaattttaggccaatatccctgatgaacatccatgcgaaaatcctcaataaaatactggcaaaccgaatccagcagcacatcaaaaaagcttatccaccatgatcaagttggcttcatccctgggatgcaaggctggttcaacatacacaaatcaataaacgtaatccatcacataaacagaaccaatgacaaaaaccacatgattatctcaatggatgcagaaaaggccttcgatgaaattcatcagcctttcatcctaaaaactctcaataaactaggtattgatgggacgtatctcaaaatgataagagctacttatgataaacccacagccagtatcatactgaatgggcaaaaactggaagcattccctttgaaaaccagcacaagagaaggatgccctctctcaccactcctattcaacacagtgttggaagttctggccagggcaataaggcaagagaaagaaagaaagggtattcaattaggaaaagaggagtcaaattgtccctgtttgcagatgacatgattttatatttagaaaacctcatcgtttcagccaaaatctccttaagctgataagcaacttcagcaaagtctcaggatacaaaatcagtgtgcaaaaatcacaagcattcctatacaccaataatagacaaacggagagccaaatcatgagtgagctcccattcacaattactacaaagagaataaaatacctaggaatccaacttacaagggatgtgaaggatgtcttcaaggagaactacaaagcactgctcagtgaaataaaagaggacacaaacaaatggaagaacattccatgctcatgggtaggaagaatcaatatcgtgaaaatggccatactgcccaaggtaatttatagattcaatgctatccccatcaaactaccaatgactttcttcacagaattggaaaaaactactttaaagttcatatggaacaaaaaaagagcctgcatagccaggaaaatcctaaataaaaagaacaaagatggaggcatcatgctacctgactttatactacaatgctacagtaaccaaaatagcatggtactggtagcaaaacagatatatagaccaatggaacagaacagagccctcagaaataacaccacatgtctacaaccatctgatctttgacaaacctgacaaaaacaagcaacagggaaaggattccctatttaataaatggtgctgggaaaactggctagccatatgtagaaagctcaaactggatcccttccttacaccttatacaaaaattaactcaagatggattaaagacttaaatgtaagacctaacaccataaaaaccctagaagaaaacctaggcaataccattcaggacctaggcatgggcaaagactttatgactgaaacaccaaaagcaatggcaacaaaagccaaaatagacaaatgggatctaattgaactaaagagcttctgcacagcaaaagaaactatcatcagagtgaacaagcaacctacagaattggagaaaattttcgtaatctacccatctgacaaagggctaatatccagaatctacaaagaacttaaacaaatttacaagaaaaaagcaaacaaccccatcaaaaagtgggcaaaggatatgaccagacacttctcaaaagaagacatttatgcagccaacagatatatgaaaaaatgctcatcatcactggtcatcagagaaatgcaaatcaaaaccacagtgagataccagttagaatggcgatcattaaaaatcaggaaacaacagatgttggagaggatgtggagaaataggaatgcttttacattgttggttgaagagtaaattagttcaaccattgtggaagacagtgtggcgattcctcaaggatctagaactagaaataccatttgacccagcgatccctttactgggtatatacccaaagaattataaatcactctactataaagacacatgtacacatatgtttattgcagcactattcacaatagcaaagacttggaaccaacccaaatgtccatcaatgatagaatggattaagaaaatgtggcacatatacaccatggaatactatgcagccataagaatggatgagtgcatgtcctttgcagggacatggatgaagctggaaaccatcattctcagcaaattatcacaaggacagaaagccaaacaccacatattctcactcataggtgggagttgaacaatgagaacacatggacacagggcagggaatatcacatgtcggggcctgtcgggggtggggggctggggtagggataccattaggagaaatacttaatgtaggcgatgagttgatgggtgcagtaaaccaacatggcacatgtatacctatgtaacaaacctgcatgttatgcacatgtaccctagaactcaaagtataataaaaaaataaataaataaacgtgcaatgacattaaaaaaaagaaatacatatgtaaaaaattattgtgataaaataagggagaccaaaataaatggcaacatgtaccagtgttatggagaggaatattcaatattatcaaaatttcagttctctccaaattgaattcaaaaagctgtttctaaacatctggcactgtagagggccaaaaccagcaaagacattctaggaacaaggccaaagtagaaggactccctctgccagagtcaagaactaagtaaagctttagtgtgtactcaacgcagtgccacactggcatagagacagacaaagagaccagcgacatgaaatagggaacccagaagcaaactatgtccctctatggggcacttggttgttgacaaaagggacactgagaataatggaataagggccatcttctcttaaaccaagcttgtccaacctgcggcctgcaggccccatgcagcccaggacagctttgaatgtggcccaacacaaatttgtaaactttttaaaaacattatgagtttttctgtgatttttttttttagctcattagctattgttagtgttagtgtatttttttttaatttaatttaatttttttgagatggagtcttgctctgtcaccaggctggagtgcagtggcctgatctcggctcatcgtaacctctgcctcccaggttcaagcaattctcctgcctcagcctcccaagtagctaggactacatgtgtgtgccaccactccaagctaatttttttgtatttttagtggagaggagctttcaccatgttggccagaatggtcttaatctcttgatctcgtaatccacctgccttggcctcccaaagtgctgggattacaggtgtgagccaccgcgccgggccatgttagtgtattttatgtgtgacccaaaacaattcttcttctttcagtgtggcccgtggaagccaaaagattacacaaccctgtcctaaactgggacagcagggaatctatataattaaaaagaaagggagttcttacccacacttcacgtaaaagtccattccatgtactttagagacctcaatgggcaatccaaaacaataaagactttacaaatctttatgtagaagaatatctttatgaccatgacatgagaatcttttttccaaaggaataaaaccatattaaaaataacaataaagagataaaaatgttttttaaacaacacacacacacacacacacacacaacatgaagcataaagtataacattgataaatttaattatattaaactttaaacttctgctcattaaaaaccataaggaaaatacaaagctgatccacagtgttggggaacacatttcccacaaataaccaaacaagggctcttatcaagaaaatataaagaactcctttagcacattgggaggccaaggcacaggagttcaagaccagcctgggcaacatggtgaaatccgtctctactgaaaatacaaaaattagccaggcacagtggtatgtgcctgtagttccagctactcaggaggctgaaacaggaggatcgcttgagctcaggaggttgaggctgcagtgaaccgagatcatgccactgtactttagcctgggcggctgagagagaccctgtctccaaaaaaacaaacaaacaaacaaacaaacaaaaaaaaacaataaaagtgcggaaaaagccttctactcacatttcactaaatgactgataaacatatgaagaggcctcaacctcattacaccacaaaatgcaaatggaaacccaatgagatgccgacgcccctgacacctgcctaccagatggttcacacgacactgacaatgccaccttgtggcgatctagagcagtaggaaatactacagtgtggctgggggtgtgcattgtacaactgcttcaaaggtttcctgtttcctagaacagtcaagaatatgaatatcttatcacctaaaattccacacatgggcacaaaccctaacaaatgtgaatgtaaatgtgtgccaggacatccacacataaaagctccctatagtgttgttcatgataatagaatcagtacacaatggcagattttttaaaccataaagacagcaatgtggattgatagcaacagcaatgttgaacaaaaaagtaagatacaggagaacacacacgatgactacggccataaaaattataaaaagccaaaattaatgtttactgtatgtgcagatgttcaggtagcaaaaccatccactaaaataacagaaaaccacaaagtcaggacaggggtcaactctaggcagtgaggctggtgccgggaggagctcaccatgacctttcttcaactgcaggggtattgtgaggtttgcatcacagacatcacttaagatacagtttatatggtgtgtcctagtctgtatttgtgtcatatgtcacaatagaaagatgagaggccatgggaggagggaaagggagaaagggaaagtgaaggggaggataaatgaataaagaaaaagagacaagaagatggagatgcagaggggaaagagagaaagaacagggcagggaggaagagacaggagaggactggggggaagagacaatggggagaaggagggagtgtgagctgcacccgtgtaacctgcctgccccagctcctccacagccgggttgtcctccccgcccaccccacccctcccccatgggacacctctgctaagggactactccccactcagcacgctgttgacctccagcccctatccagaaagtctcatctcccaaaaccctgcccacaaccctaaggtgaacccacagttgagggagctcctcccctagtgtcaacctggctcccacctcccagtgcgggagaaaagcaaagcagttgagctgggaggctttggggacaggccattctccaggagccagcctggccacagggccaacggtccctggcagagaacgacagggctcaataagcagaggccatgcaggccccaaggccagactacagtgggagccagtgtggccaggtgcccagaaatcccaacagcaccactgggtcccttagaagatgctcaagttcccaaaactgggggttagaggcaggggattagtcagacctcaccttggacagcagccccagccctgcccagggacaccagggcatgagggtgtcacaagcaagtaggtggctcaaggccaggtgcctgtgccttggctgagggacgtggctcaggtcagtttgctccatgactccctgggtcccacagaccccactccacgctctactgcagcccagtgcactgcatggtgctctgctgtgccaggttgtgttgtgtccagttgtgctgtgttgtgtgctgtgtcactgttccagcaaactccttgtccggaagctctagggccccggccactgagaagccctagccctgagtcagcctcaggcaaggcctgcatccctgctgcctccctttccctggctcagccttgcagctcccgctgacccctctgccactcacccacccatcacccccacttagaggccaggaagcagcgggagctgtatctccctcccaaccaccccctcccctctttcttcatcctccaggacatgcatttctaacagaaaccagaaatcctgcaaatgccctgacccatccactgaccccagggcacctcctgcccaggtgtttggcacaggggacgcccccacaccggccccatcatgtacctggtggccccaaggctgcagcacgggatgcctttctgaccctggacctgccctgggccctgctctctgccaccgctcacaggacaaacccaaacaattgctgtcctccctctgaaatggtggccatgagagtgcaggccttgcgtccctcctgtgcccaggcccctcacccacacactctggctggctgcatctgttgtccagagcccttggtcacaaggcgtgcagcctggaccacagtgatgacaagggaggcccttcctaagcctagagatggtctaaaccttcatggaactgctggtcccagtgccagccagagtcccaagtgaggctgaggtggctcaaagtggtgcacgggagatgtctgatatcaaccctctcctggaggtagatgatgtctccagcctggtgactccctggccaccagccaccaccatcccccatgtccccaaggctgaaagtgcaagcttgccctggccctggcacagaaagtgcacgatctggtcatgtcatgcaggtgacctcatgcgggcatggtggcacttgtggggcagtcctgtaacctgcagtgtggtgggtgggatggatgtgtgtgacacaggcaggaactacccctcatggcagttgagggcccacgtgtgtattgggtggggctgatgggagtgagaggtgagtggctgggcacaggcaggtgagtgagtgacagctacacaaaccccaccactgagcatgtccctcccaggacaaagcaggtcagagccacaggcccagccctgggaggcccagaggggcctcaggtcctcagggacctggccctcttggccctcagaggaccccactccctctagaaagccccccagctggctccacctgtagctgtgcaagtgggaaggggacacagtgctctggggtccagagaaggaaggaagatggagggagggcggccctctgctcccaggtcctctgttccctgaccctgatgctcagccccctgcggccctcctggagcccacacctttcagctgcagtctcccagcctctctccccaggacgaagcccactcagccagtgcttttccactgtagctggcttttccccttggggagggtccccagattgtacaaagtgcagaggggtcccctgtccctgtcccacagggtccccacaccaggctttctcaatgtctccctgtctctctcagacaaggagggcagaggcagccacaaggccggtcccagccacaatcacacccgcatattcagataatcacagacgcttgtcccacacagtcacacaccccaacctcaggtaccaaacaccccacacactcccgacagcgcattctactcacacacacacaatcccattctcacacatgtgcacccaagcctctcgccccacatacaatgtgacaggccactgggccacctgcgggtcccagtgcacatggatgcctgcagtgcacagccacctagatcctgcaccaccggacaggaagggggcgggtacctggcagatgccacctgctgcgcccactgggccaccagaaactccacctctccccgactctccaggtcccagccaagccacgcccaccgggcctgcccccaggaccctgagtttaaagaccccatctccccaaatgccagagggagaggattccgcaccaccccaagtgtaacccacaccctagtcggccctgaccccgcactgcatggcgcccacctgagccctggcgttgctgggcctcctgctgctgctgttgctcgtgggtaggccctgccaggagaccctgggctgcgctgcagccctggggtacccacccctccctgctcacgtgctcctactctccctgcagatcccaagaaactatgcccgcagctcgtgaccgtcatgaaccagtttctgaccgaggacaaggacacctacatggattctgtcaacagatatcatcccacggagctggaaagaaacacaccctccaaactcaaggacatggtgaccaacaccacgacccccgaggagggacaggccgtcatgcagcaggcccggccaccagcgcctcctcacagcccttgacctcctttgagatcagggactctgttccctgagagcctctctctccacccaaacacttccccacctctcaccaagcaatgtccctgcagacgggcagctgcccagggaaaagacctcagggcgctgggtctccgccctctgatactcaacctctgctgtcaaccccatcctatccctccttcccagaagacccctcccttcagcctcccacccctccccacaggaagaaatcaacaaccagggtgcctacacggtactgaagtgacaccatccacaggcacctcgaatctctgcccaggcagcctgtccggcccaggagaacctgggcccggggccccaccctccccagctcctgccctgctgctgcccctcctcccactcctgctgtgctaattggggctgattgcgggccactactttatttacatagggtgtacaccaagtaaccaatgggaagcctctagagggtatttagaccccaggaaattctaaatgggctcttgagcccttatgcttgggcctgctcccggtttggagtgtactttcactttcagttaagtctctgcttttgttgcttaattctttctttgctttgtttgtgcgttttccccaattctttgttcaaaacagcaagaacctggagaccctcctcctgtaacgggaaggtgggatggggggagcccaccctgacactgacccgggccacccacgtgcccctccccccacacccatactcactagggccctgggtggagcttcccctgctgctcacagctcggtgagtggccaggccagcaagctcccccagctgcgcccctctgctgattttgcccctggtcacccttaccaatcagggtccagtcaggtgacagaagtcacaggcaagtggcttcaacacccacatatgtagtgagaggtgacagcatgctggcggccctcgcagccctcgctctctctcggcgcctcctctgcctgggctcccactttggcggcacttaaggggcccttcagcccagcgctgcactgtgggagcccctttctgggctggccaaggcgggagccggctccctcagcttgcagggaggtctggagggagaggcgcgagcgggaaccggggctgagcgtggcgcttgcgagccagctggagttcccggtgggcgtgggcttggcgggccccgcactccgagctgccggccggccctgcctgcccgggcagtgaggggcttagcacctgggccagcaactgctgtgctcaatttctcgccgggccttagctgccttccggcggggcagggctcggtacctgcagcctgccaggcctgagcctctccccctcctctgtgggctcctgtgcagcctccgagacgagcgccgccccctgctccatagcgcccagtcccatcgaccacccaagggctgaggagtgctggtgcacggcgcgggactggcaggcagctccacctgtggccccggtgcgggatccactgggtgaagccacctgggctcctgagtctggtggggacttggagaacctttatgtctagctaacggattgtaaatacaccagtcagcaccctgtgtctagctcagggtttgtgaatgcaccaatcgacactctgtatctagctactctggtggggacttggagaacctttgtgtccacactctgtatctagctaatctagtggggacgtggagaacctttgtgtctagctcagggattgtaaacgcaccaatcagcaccctgtggaaacagacggctcggctctctgtaaaatggaccaatcaccaggatgtgggtggggccagataagagagtaaaagcaggctgccccagccagcagtggcaaccagctggggtccccttccacactgtggaagctttgttcttttgctctttacaataaatcttgctactgctcactctttgggtccacactgcctttatgagctgtaacactcaccatgaaagtctgcagcttcactcctgaagccagcgagaccacgaacccaccaggaggaactaacaactccagacgcgccgccttaagaactgtaacactcactgcgagggtccgcgacttcattcttgaagtcagtgagaccaagaacccaccaattccagacacagtagcatctcttcactgtgtaacatgtgttcctaatgcactttctatatctcacttcctttaggttctgtgttttattccaggtaatgttccttgaatctaaattacaatttactaattttcacgaaagctgcacctaatctgctacccattcagacaaacaaactcatttatcaaatgtttgttgaaccggcactcggtggcagattctgtgctagggcgtgccaagtgcagacacatgtttgccaagacacaccgttatgcctcagggcctcctgggtgcacatgcacacatggacctgcaggctggcaccatagtgctcagcctgctcccaatcccacggtgctccagggaggacacaggatgtcacagcaacacccaacccatcccactgcatgctgagcttagttcctgatacactgtcaccccaaaggcatggcccagggccgtgggtctctctgcagacctgccctgcccccacttacacacacacacacacgaagaggtgtgtctcatttccacctgtgggattctaatttatggcagtgactgagtgaccacacagagaggccaatgcgatggaaaacattattatttacatttcccggggcacaccatgccacacagggccacatggagagcaccagtgctggtcaggaggcaggagcaaggggaacccataggccacagcctttattggggttcccatgggaaaagccaggcagggcagagtaaacagcttatgattagctagtttgaataatcccggcaggctttggcctatagtgttggtctctggttacctggtacctggtcatggggtgcttcagtgcaggggagatattggcgtggggtgtgagagttggataaagaggtaatcggggctatagattcagtgccagttggttgtatatgagacaggtgctccaggtcgagcgttttgccatctctaagaaaagactaatcctgggaggacagtctccagagccagcaaactttaaaagatgtcatcataaaatacagaaaataaaaagcataattacaccaagtcgcagagtaagtggatgtttaccttttcacaaactgactaactgtgttccaaagtggttatactactacattcttaccacagtgttatgaggatttcaggtactccatatcctcaccaacacttggtatggtcagtctttaattttcactattcccgtttggtgtgcagtggtatttctctgcgattttactttgtatctccctaataactaatgtttacaatttttatgtgtactactgccatccctctatcttctttggttaggtgtctattcaaatcttttgcccatttaaacttttttctttattattgagttttgagagttcttaataaataatgaatacaagtccttcttcagatatgtggtttgccagtatagtcttctagcctatggctcttttcttccttcatcttaaaagagcatgtcgcatagcagaaatgtttactgttgacaaagttgaatgtgttatttttttctttgattgaacatgtttttggtgtatatttcagaagtatttgccaagattttaaaaattctctcatgttacttaatgaaggtttcatatattcaggtttataatccatgctgagttagttcttgaatattgtataccgtgtgaggtttgggatcagaactttgtggctggtttgtttgttttgagatggagtctttctctgtcacccaggctggagtgcagtggtgcaatcttggctcacttcaacctccgcctcccgggttcaagcagttctctgcctcagcctcccaagtagctgggattacaggcaccacccctggctaagttttgtatttttagtagagatggggttttaacattttggccaggctggtcttgaactcctgacctcatgatacacccaccttggcctcccaaagtgctgggattaagggctgagctactgcagctggcctggtttttgttttaatatggatgtccagttgttccaacaacacttgttgaaaacacgatcttcagtgaattgcctttgcacctttctaaaacatcatttgatcttctaagtgttggtctatttctggactttcttaatctatatttttgctaacattttaaagtcttaattaactttataatatgtctttaaatcaggcaatgtaatcgtttaactttatgcatctttttcttttttttttgctattctaagtgctttgtattttcatatcaattttagaattcacttgttattttctaataaaagcatcgtgggattttgattggattgcattgaatatatgtttatcaatttgagaagaattagcacattaacaatattgagtgttctaatccataaacattgtgtatctctccttttatttagatctttaattttcctcagcaatcttttgtagttttcaatgtacatatcttgcacatcttatgtgtctcaagtatatgttgtatgctcttgtaaaaagtgcttttaaatttcagtttcaaattgatcattgtatacagaagtataatttttttaaaaaattattatttaccctgtaaattttataaattcatttattccagatttttttcacagattctatgggattttctccattaatatttatgttgtctaacttatttgttcaattttatgtgtttattttcaaactggcaactgtgaaatgtattggaagattattcataaaattccttattactgttttagaatctgtaaaagctggttgtggtggtgcactcccatattccaaactaccttggaggctgaagcgagtgaactgcttgagcccaggagttcaagacttcagtgagccatgatggggccaatgcactccaggtggggtgtaaaaataaataattaaatgaataaatgaataaataaataaataaactatgtagtatctagtgatgtcatctcatctgtaacttatcggtaatttgttttttctcacattttttttttttgctagatccacagagttatatcccttttattgatctcaaaaaatctgtattggttttactcgtttttctctattgctattctgttttccacatcattaatttctctctgatctttactatttccttcttgttttgagtttcaattgtcttttttcaagtttttaaggttgaatctgtcattgatttgagatagttctttcttgatacaggcatttaatctacaaatttagcagcatctacaatttattttgtatgttgtgctgtcgtgtaataagatagtggcctagtgtagctctagtcttatctgtggagattcctgggtatccatctttatcccttggtcaagataaattagtgggatttataatgagctcattaaaatctaaaattcctcatagtcccaagggccgatgtgtctaccaatggcttttgctgtggtctgaatatttgtatccccccaaaattcctatgttgaaacctaatcatcaatatgggactcatttgaacctaaacttccaccaaaacacaaacctgaaactttgtctcccttcatacacgacaccttcttccataacctcacatggcaaaaggagcaaacaagcttgggcctcttttataaggacatcaatccattcataagaactccagcctcataacttaacatttcctcaaaggcctcacctcttaatattgtcacactggggattcggtttcagcatatgaattctgtggcgggggcgggggacagacattcacatcatagcacaccctgaatcttaaacagcttctgcatcagagtaaactggcttttcttctccaaagttcatattctaaaatgtgcccttgaccagataaatcccaacagcaaaaattactgattgtaaacactgcattattttaaataggaaagggacagaaggcagctaagagctagtggaagggagtgggttgagtattgcatgtaatgtgttttagtttctccttattgctctctctctctgcttcattttctttctcaagtgtctggcatatttgtttaaatcagacttgcttatgcctatgattctctctacctcacacccctgatttctgttcctcagtctctattccagtgcctctaacctttctgctaacaatgcaagtcagggtgtcactggaaaaggggtctcgatccagaccccaagagggttcttggatcttgttcaggaaggaatttaagatgtgtcgcagagtgcagtgaaagatgcaagtttattagaagctacaccattagtgagcaggaggccctcagaaaacaagaggaggaatgcactggctttaagtttttcttatataggggtcttatctatgaaaaaactaagctaagctgggtctatgtgtgggtgagcaggcagaataaaaaaaattattacagtattcatttaaactaacctggacattccagtgtgtaagtacatcaaaacatagctattatcttcaaagcatatattgttacgggtattgggacatctggactctgcactgttgtaggagtgtccctgtaggtatctttaggctgtttcctcaactataaacaccccatgactatgggccatgaccgacaaggaatgtgctttgctagtctcaaaatggaactatacttaaaatggcatcctctggctctcttatactcctgcttccctaacgatggggcattcacaagttaggggtttaacttcacaggaatgctttttatgagatggccagacatagctattgaaacaaaaggactagccctccatttaaagttcttctcacctatgccctgagtcacatctagtcctttaatgttggccctctctccactcatgaacttaactcatattccaaatatctgaggactcataatgggaaaccaccataattcttccagtgagatcatgaggaaaagcagaaacaatgaaaaatccctatgtaagcttttctggatggactgagcagggactttatgtcttaagtgtggtttaaagtggttccaaagtggcagggatcctggtcttgtctgaaaggaaattatataatctctagaagagaaaggcactttcatctaaggatatgggaaagctacatgaaatctcttttcaaggacaaagataaccaacaaaaaaggaagcaaagcaaactgattgaagaatttggaaataaacatccaaacgggcccacaaaatcttcagttattgttattatcagatacatattatgaagcaactatacctaccatgttaaaaaagtttggaaaattgaaattaaaatgtcctggagagataattatgaatgggcaatagatcggaataaattatccagaatgcaacacagagattgaaggatgaaaatcacagagaatttaagacacctggaggatagaggggtaacacctgcctcataacgaattggggttctcaaagcagagaaacaatggtgaagaggcaatatatgggagaggaagagtttgctgattaccagagatgacacatcacagattcaagttgttcagcaaatcccaagcaggaaagaatttaagaatttcataaccagaaacattatgccaaactccagaaaacacattcagttactatttcagttgaaagcccaggattctaagtgggaaacgatcttaataacctagtcactgcactatctcactatctccttaaacctcattttttcctatgtctcttgcattttaatattaaaaaggtcatcattccaaaagaacttgaccaaaagacctgcaattctcagagaagggaatactaagaccaatagacattcaaaaagattctcaatctcattaacaattaaaaaatgcaactttaagccacagtgagttactatttcacacctagtagattattaaacttttaaagtttcacaaagagagtgttggcagtaagagttggcaagcaaaataaccataaactctggtaggagtgaaaattggtacaactttggaaaacaattcatgattgtatagtaaaatcatagatggaaacatgctttgcacaatccagtctttccttattacatactctaagccttgagaggaagccagctgatgccagtgttttttaaaactgtggctgctataggaattcacaaccacacccacaggatacaccaaggtagaactgtcagaggtgtttaaaccagagcgactccatcttgaatagggcctgggtaaaatgaggctgagacctacttcccagacacttaaggcattctaagtcacaggataacattggaagtcggcacaagctacaggtcaggtcataaaggccttgctggttaaacaaattgcagtaaagaagccagccaaaacccaccaaaatcaagatggcgaggagactgacctttggtgtcctcactgctgcttgttatgtgtccggaattggttccttctggtgggttcctggtctggctggcttcaggagtgaagctgcagaccctcgcggtgtgtgttacagctcataaaggcggtgcgtctggagtcgtgctggagttgtttgttcctcccggtgggttcatgatttcgctggcttcaggagtgaagctgcagaccttcacagtgagtgttacagctcctaaagacggcgtgtctggagttgttcgttcctcccagtgggtttgtggtctcgctggcttcaagagtgaagctgcagaccttcagggtgagtgttgcagctcataaaggtagtgcagacccaaagagcaaaagaacaaacatcccacacctgggaagtagaccccagcgcggttgccgctggttgttcgggtggcccgtttttattcccttatttggccccgcccacatcctgctgatttgtccattttacagagcgctgattggtctattttacagagtgctgtttggtccgtttttacagagtgctgactggtgcatttacaaacctttagctagacacagagcactgattggtgtatttacaatccttcagctatacagaaaagttctccaaggccccacctgatccagaagcccagctggcttcacctctcggttatatgctaattatatgcattagcacgctaagagaaacgctcatcagtgccatggcaatttacaaatgccatggtaaggttcagaagttaccctgtatggttcaaaaagctgggaagccctcagctccgagaaattgaaattgcccacctctttcctggaaaactcatgaataatccacccttgtttagcacatcatcaagcaataaatacaagtatccctagtccagcagcccaagctgctgctctaacaatggagtacccattgtttctttactttcttaatacacttgctttggctttgcactgtgctctcccatggattttttcttgcgtgagctctaagaactctctcttggggtcggatccggacccctttctggtaacagaagcactgcttcacgaagatcatgcaggtcagtacttaataagtacaaaaaagtctatagcgacactatttataattttaaaaatgattgaagtcaattaacatttaagtgttaaaaagaaagtaaacaacccaaatatacacaaacagtagactgctctggcttgcatacagagaggtccattgcccttttgggtgggcctaagaagcacttctggggagagggggcgtcaggctgtgatggctgcgggaggagtgactcctcccaggatgagggtctccatcctcccagtgctcactcaagttcagtatttccaagtccttccaggggcgtaacgcacgtcagaacggccattagtgtcacagatacgtgtccccttgcatttccaggaaatgcccttggttggcgaactacagtcgtgacagtcgggccacagggcgttttgtgagttatcgtcttgggcaaatgagtgccaaaaaaaaaaaaaaaaaaagacctgaaggtgaacagcatagcggcagggtttgggatgagaggagcccctttgctagcaacggcgagcacttgcgcggtaccagcaagggctgcccatgtctcggagggaaacgtttgtgtgagcgcaggaatgacccggaagaccttggcacggctgcagttttctgggaaatgtaatttcttggtccgggcgccatggcccttataagtagagggtgtcccttggtttcgagttgtatcgttcaccagaggacgactgtgtgccccaggacaatttgcgcatggtcctagctggccggctctaggtcgacggccccaggcggttaagctacttacaaagccgtgaccggtttgcccgcggcgcaccaggtccgcgcagccgcagagacccttgggaagtgtggtcttcgggtgccggcggttcgcggcttccgggacatttgtaccgcagggggaggattctgggaaatgtggttcgccgtgggcggtgcactgggtcagtcccgcgatagcttcaggcctggcggcggcttccaagctaaggaacggtttggggcagtgtcgttcccggaggtcggccgccgttacccgctcaccagctacgcggcgcgtcaggtccgcggaggcgcgggctcggggcgcctgcgggacggtgaggccctgctgaggactccggcaagtgtgggtcgcggcgacggcggggctaaggccctgggtccgcgcgcggtttgaccacggccggggccttgggcatttcctggccttcctgttgagccgtgtaaacgcggggtgatgacggcgccgacctcttggcactgttgtgagagcgaagtgggcgcgagagcagacgccagctacagttttttttgggttatgtcgtcatgaagccggcgctttcagttgtgcaaccttgaacaaatgggttcagtatctcggaatttcagttttgtcttcattttaaaaaataaatctggtttagaactcgacctcaagcgatccgcccgcctccgccttccgaagtgctgggattaaaggcgtaagccaccgcaccagcctaacgaacatggcgaaacgccgtctctactaaaaatacaaaaaaaaattagctgggcgtggtggcacgtgtctataatcccagctattcgagaggttgaggtaggagaatcgcttcaacccgggaggcagaggttgcagtgagtcgaggtcgctccattgcactccagcctggagacagaacgagactccgtctcaaaaaaaaaaaaaaaaaaatctggaataatatgaatgcacaccttgcaaagtggtgaagactgaacgagctgataaagttgttaccgttgttttatgagtcttttgtatacagaataattgattttccccgcaggtggcacctggtaaatagcccttgcggagaaacaccctgttccttcccagggagagattgacgctccggcgagtgattaccagtgtgcttttccattaaggtgtgtgacaggtgccgcaagataagcccgatttttcatgactgctttttcctgcctttctgtgccctcaggacactgcccatctctaagataagaacctggaaaggggactctgttggccattggaaattgcagaataatgtctcaggtaagtcggtgtgtccccaaatcttcctgaaacactttattaggcctctgtgtgtttgctttgcttctcctgcctgttcccacctaatcaagtccatttaagggactagatctatggttcctttcactataggaagaatggagcccacaggagagctccaaggtattgtcctcatcacccagtgttcctcttttctacagttttctgctagaagactttctagattgccaacattttaaaactgtaattcacaatgcaactttggaatgtaaggttattcggtttatggttgtcaaaactgtaccatgtggtctcaagtgaagagatgtttggagtcatccttgattcttccttttgacttataactcatattcaggtcctctagtttggatctaaacgatacaccgtatacagcatctgaccattagttagcccatcaccaccaccaccactaccaccccagtccgagccacctggattattgcggtagcctcctagctggattcccagcatctgcccttaaccctcatcagtctgttctcagtacagctgtgaccatggtcctattgttatataaattcctgtcattccgcaacctaaaatttttcagtggttctaactgagtcacttctgcaatgacctatttgtacaattaggccattacctccctgatcccaccttccttctctgcctcctcattcctgtgcgctccagcctctgtcaccagttgctgtgccatccacgtggaatattcttcccccacatacgcacaagcttgcatccttatctccttctgtgtttgttccgtggttactttctcagaacagcttccctgaaagcctatttgcaattgcagtcaccttccctagcgcttccactcctccatcactgctttgttgttttccacagtgtgtgtcactcactagctgatgtactgtatgttcagtatatgcacgtgctcattgtctgttcctggtgggaggaatgctttttcttctttgttgactgttatagcgtcagtacccagagtgttacctggcaccaaatggatgcttagtaagtaattgtggagtgaataagatgagtaatgaagaactggtggggcagaatcatggcatggaaggtgaagcttgcacaggaggggatgtaagtagcagatgtacatcttgggtgaagtctgttttcatggaataattaagataattagaattgaaaaactggtgtggtagtgcatgcctgttgtcccagttactcgggaggctgatgaggtaggaagatttcttgagccctctggtgtaagcctgtagtgagctatgattatgtcactgcactccagcttggtgacagagcaagaacctgcctcttgaaagaaaaaacaaagtaaaggctaaagtgaactaatgccaaaaccattcattggttcatcttctaaacacttatgaagtacctgttaggaagagttgtacatggattttggtgtacactgacacacaggacttcatgatctagtgcagtattgtctaagagaactttctgcagtggtggaagtgctgtgcatgtgtactgatcagtacggtagccaacagccccatctgactattgagtacttgaactgtggcttaagcaatggagaaaataaattttaaattttatttaattattttatttttacattttaattaatttaaatgttgtagccaagttggctagtggctcctgtattgaagattgtggcactggtagaaaagtaagaaagcatgggaaatttaaataagtgctaggatagatatcctatgttcttttgggaactgagatgagtgaacatctcaagctgcccaggcaactgaaggggaagaaagaagcatccctggctctaagttgtaatgactggtttgtcaaagatatgagaaatgttatttttatttgggatataggcaattaacacagtggcaactccaattaacaggtgaatttagaagaaattttgtgtagcaaattgaactgtcaaatcttacttgaggataagttattgtttatttggaaaatgtgtgttggattgtatctgcttgcctatataaaaagatgagatttcttcctgtccttttcatctcaatagtggatcgcttgtgaagtgcatcaaggtctgatttagcttattcagtaataaaactgctttctttttttttctacatttgtggagaggattttctgccattggaaggcgattcgaattttaattattttctccaaacctgagaaaagtaaattctgcctttaaaaccaaagatccatgtcactggtgaacatgcatgcaaaatatccaaataaagtaatacaatactgaatgaactctcagagctaaaaaattaccacagtagagcagtctgttttacaaatcacagacagtaataactctgtattaaatggctgtactttttgcacatattataatttgactagccaataagctattattgaatatttaaacttctaaagttttactattttaaataatactgtgaaatgagtactattgagaagaatttctaagcacatctgtgagcatttccttagaatattttctttgaaatctactcttatttttttccccttccaggtcctatttaaggactgtctatggcaggagtcctcaacctttttgacaccagggatcagtttcgtggaagacaatttttccacggaagtgggaggtggtggaggtgatggtttggggatgaaaccgttctacctcagatcatcaggcattagattgacataaggagtgtgcaacttcgatcccttgcatgtgcagttcacagtagggattgcgctcctgtaagaatctatgctatagctgatctgacagcaggtggagctcgggtgataatgctctttcctgccactcacctcctgctgtgttgcccggttcctaaaggccacagaccagtaccagtccgtggcccaggtgttagacccctgatctatgacatgaaaccatccttcagtcttttcacccaggagtctcatattttaattattaaatgtttgtcagcacgaagtttaagtatacaccacaaatatatttttcttttttgtttatgaatcagttatgtgtatgttttagtccatttgtgctgctgtaacaaataccccagactgagtagtttataaataatgaaaattgacttctcatggttttggtgcctgggaagtccaagatcaagaggcaggcatctggcaagggccttcttgctgtgtccttttgtggtggatgggcaaagagacgagagagaggcaaaggggggccagaactcatttttttaaataaggaaccctcttccctgatgatgacattaatccattcatgagggcagagtcctcaaggcccaatagtctcctaaagatctaacctctcaatactattagaatggtgattaagttcaatacatgcttttttggggaacataatcaaaccatatgtctatcagtctttaatattaagatgtcttttttttctgaacccattttttgtgagatttagtgaatctttctgagtatcatatttgagagacaattgctttagccttatttttaattacttagctagcatgtaagctataaaagatataactaaatacttgactctgtgctgtcaaatgtcaaatgttgatttttaaaaattcatataattctaaacttttaacaaaattactgaagcaaagctctcatatttgtctctcattcttattgtataaaaattctaagcacataactgtcccctttattgtataattccaactacataactgtcctattattacttacctgacatcacattcccagtcattgtcacagctcctgaatcttgttccatttcttccacaagcaggctaattttaccccttcttcagtgacagaagaggcctgggctatggctgagcctaaatatatttgctatttcaggtgacatttagtgatgtggctatagacttctctcatgaagagtgggcatgcctagattctgctcagagggacttatacaaggatgtgatggtccagaattatgagaacctggtctctgtaggtaaggatatcaccccttccactccaataggggacacctttcttttgccaccctgaattgctggagattctcctaagtaaatggctgaatttctgtaccatgctcccgaggaaatgtgcagctctgttgtgccctgcctaaagcttatctttccatttcagtgaacacccttcatccattcctgtggtccctcttgtgatggcctctcataatagaggaccacagcttaaacaattctatatttttcctgtaagcaggtctttccgtaactaagccatatgtgatcatgttattggaggatggaaaagagccctggatgatggagaaaaaactgtcaaaaggtatgattccacatgagtcatggtgaacgagacaaaggaagattttgttaaagatgtttatagtgagtgtggaagcattttagggatactgtcttcaaagatctcagatagaaatgaaaaattgagggatatttagcttagattttcaaaacaattgttcctccctctcaaattattatctgtatcactcatgtcacctaatcaaggttagaggtttttgccatcataataattcaaattgttactatattcatgacaaagtaagacaatttattctttcttaattctacttaagaaaaatatactaatagttttaagctaagaaaagctgtcagttagatggaaaatcacttttctaaagctgagctttgtagatgaaatatgaacatattagaggaagtaagggacatataaatgtttctaggaataatattttctaatgttcaagaaaaatatgattcacacagtttcttcataacctcagaaagcctatatctttgtcagctataaagagcatttactttgtttttactgcagttgtttaatatagtagtatcaattctgtattttaagcttgataatccagcagcaaattgagattaatggaaggttggaaaaaaaggctatgaaacaaaatgcaacctttcccacatgaatataggcacaaaatgatgatttgtaatcctgaatgccttccacatcttatttctgatactttccttttttccatactattttatccatttcgtacagcttacccatttcctttatcacactctgttcctgcttctgtgaactttggattctctgctctatttgagcattgttcagaagtcactgaaatatttgagttgtcagaactatgtgttttctgggtgcttcatttcttatccaattctcctaattccactgtagaagcttttttcaagaagtaaaaaaaaaaaaaaaaaaaaaaaaaaaaaaaaaaaaaaaaaaaaaaaaaggcagtgctttgctttcttgatatatttcagattgggaatcaagatgggaaaacaaggaattatcaacaaagaaggatatttatgatgaagattcaccccaaccagtaacaatggaaaaagttgtaaaacaaagttatgaattttcaaattctaataagaatttggaatatacagaatgcgacacatttagaagcacctttcattcaaagtctactctttctgaaccacaaaacaattctgctgaagggaattcacacaaatatgatatattaaagaagaatttatcaaaaaagtcagttataaaaagtgagagaataaatggtggaaagaaacttttaaattctaataaaagtggggcagccttcaaccagagcaaatctcttacccttccccagacttgtaatagagagaaaatctatacatgcagtgaatgtgggaaagcctttggcaaacagtcaatcctcagtcgccactggagaattcatacaggagagaagccctatgaatgtcgtgaatgtgggaagacttttagccatggttcatcccttacacgacatcagataagccatagtggagagaaaccttacaaatgcattgaatgtgggaaggcctttagccatggctcatcacttactaaccatcagagcactcacacgggagagaaaccgtatgaatgtatgaactgtggaaagtcttttagtcgtgtgtcccttctcattcagcatctaagaattcatacgcaagaaaaacgctatgagtgtcgtatatgtggaaaggccttcattcatagttcgtctctcattcaccatcagaaaagccatactggagagaagccttatgaatgtagagaatgtgggaaagctttctgctgtagctcacaccttactcaacatcaaagaattcacagtatgaagaaaaaatatgaatgcaacaaatgtctcaaggtctttagtagcttctcatttcttgttcaacatcagagtattcatactgaagaaaaaccgtttgaagtttagaaatgcaggaaatccttcaaccagcttgaatcactgaatatgcatttgagaaatcacattagattgaaaccctacgaatgcagtatatgtgggaaagcctttagtcataggtcgtccctgcttcaacatcacagtattcatactggagagaaaccttacgaatgtattaaatgtgggaagaccttcagctgtagttcaaaccttactgtacatcagagaattcatactggagaaaagccatataaatgtagtgagtgtgggaaagcttttagcaaaggctcgaatcttactgcccatcaaagagtacataatggagagaaacccaatagtgtggtaagtgtggaaaagcctttagatcatatgaatccctatacatgtgagaaatcttacagaagagaagcagtgtttatcacggtaaacttcattcatagatcctcccttatttaacatcagaaaaatgtatactggggaaaagttgtatgaaggtggtgaacatgggagacttttagcaatgatgcagatttttttattagagtttatactgtagagaaatcatatgaagtcaataaatgtgggaaagcctttgtcagtattaatcccttaattgacctaagtatactcacactaggaaaaatctgtgtacatgtagcaaatgtgggaaagactataggcaataggaatctcctgcaaactcctacaggagaaaagttgtatgaatgtggaaactttagaaattgaaggaatttttcagttccaagtgcatcccttattctataggaaataaactggagacaaatctcatttaagagatgcagcaaagtgttcactaagagtgtttatcttgccagacataagaagatgaatggtagagcaacctgaaggatttagaaattacatataaatctttgcagttatgctatttgtaaacaggattatataggagagcaaataaacataagtatgcatttcttagagcagtagcttgcagtttcagttgagttctacttagaaattctttttagctagtgggcatgtgaagatatttagtcacccagaggagccagtaaatgttataatgttaaaaattaaagctgcaaaagaaataaaatggtgttaataaaaatttggcatctaataaaatcattttgtatatcatgaactctttctctgtgactgtttgcgacaaaaaaaaatttcactaagattagccttagtatagcctttagcgggagactagcaaacttcgagaagaatggcctgctctttatactaagaatagcagtattttggtgaggattattgagtccatatccagtaggcttaattaaatacatttcaagaacatttactgagcattactcatgtgtattacacagggatgggataaaggaatctagtagttctgagctctagtgctgtgtcgaaatcactggaaggacgtgttaaagcacagattgctaagcctcagtcctagagtttctgtatgagttgatttgaatttgcatttttcacacgttcttaggggacactaacactgtttgtccagaatataataataatgttatggtgtcactgacaacatattgtttcctcaatcttacctattaaccatttcttgagcatcttctgtggacttaagaaacactccatactccttaagagcttcgagatgtgtgtgtgtgaagagcattaagctttggagtcttgttacctgggtttaaatccaagttacatgtatactggctttgtgaccttggacaaactgtttcactgggtcatgctgcagtttctccatctgtaaaatggtaataaacctatttcacagcattattatgaaagttaaatgagttaattgatgcacaatgtttacaacaatgcctggcctctcaatagcattcagtaagtattagctatagctattgatttcatcatcatcgtcttctcatggttgcttcattattctggtctcagatgtcacatctaatcacttgccactcttatctgtttactgtttcacatttttgggggagagcatttacaaaacacccccgtttccttccaacaaatcctttagtatctgagccattttgagggaatgtttcttgcccaaaataacctaaggagaaacaaagagaccagataggagatgagatgagaattcagcaggtctctgagaaggaagaaggatgccctacagagttggaaaatgggccgagtgaaggaggcatcaggcttccacatggaggaaaggggagggtttacccactgagaccagaagactacaggtctttggcatcatctctgagtacagagtcccatgggctgggtgccactgccctcactcttcctgaatggaggttacagcctgtcattgaaggtcaccgatgcctggaaagtcagagttttcttgttagccttgggccagtcaaatgtgattagaactcagttgctggtaaacatctagaaagaaccaatgaacatatcactgagcacttcctgggagcttaattctttgctgctgagggggagtcagtttttaaacaaattgcaattgtgttagaggaaaaaagctttatatgcagaagtaattaatggaagatacaagacaatgacaaggccgtgtggcccgtatggcccgagaggtgctgagggtaagcactctggcatcaaagaaatagggaaaaactataatgatcataatacaataccgttaatagcagcagccactgcgccttgtgtttgctttgtgtgctgcattcagacaattaaatgctgtcagctctggacacaaattgctaggtgtgaattcagcctattgggactgtcgcttgcttattctatacacttggggaagtcacttcatttcccgatgtctccatcaaaacaaaaatatttctcatcaggtggttgtgagaattaaaagatatataaagcaagcaacaaagtgcctctgcatggaagtttgttgccgtgtttttcctgctttcaataatcttcccacatactgtaaggtaaatgccataatcatctttgtgctagtgagctgagtgagtctctctcagagtcacacatcttaggaatataggctacatttgaacatttagtaaaagaccacacaatattgcccttctaggacagatctcagaagactgggatttctcttggcaaccataaggctctcttgcctcactgaacaaaaaacatttcctttggccatgccgctccttctgcctagaatgtgtcccataccccatttattaccacgcttacctgccaagggaggcctgcctaccttgcaaagctcactaggtgtgtcaaagacgaacaaagctggacattaatgacagtggtaagaacagactaattgataactattgcaatggggaaaggaatttggcatgaagtcaactaagctttgatttgtacaaaggtaaatgagtatgttaaagggagggtgaagaaatagggggtggtgaggagcggttcagtggagtcagaaaagtgaaaaattaggaagggagggggctggtctatgtgcagtcttatctgggtttgctactggcacttttgagttaggctcatatcctcccacagaggctgggagacaggggccttatcttcaggtgctggctggaagaaattctttggacagccttgagttttttggaaaggcactttaggagtcattagaaaatgttagtgttgttcaagtctcaataggccacagttgacaggcatattcaagaaggctcagaggggcctggatagagtttggtcaaagaaaatctttgtcaggtgtcaccgcaggcttctccagcccactgaggaggaatggtggtgaagacaaaagaacataggcaagggatcaaagtacagggtgtgagtttctgccaagagttgcgtgaccctgagaaggtaacttaagttttccaaatctcaggttccttttctgtaaagcaggaataatagaaactaactctgagaaaattgggattaaatgaagtgctacataatggtgctacataacgagttaccctcagagctcaataaatgtagctattattgttatttagcctctttgctcccacaccaccctggaaaacccaaccaagtcctgatctctacttttgtacgtgtgccacattccctgcacaaagattccagaagatgagaaatacttaacctagaaccagcaaggccgaaaaaaaaaaaaaaagactctcctactaggtgacattggtgcagaacagggaaggatgcaaaggaggagaggagagggagaggcactgcagagatctggactcagtgtcccaggcagagggaaagactgggaagtcggaaagagcttggaatgatcaggacagcttggcaggagagcagtgagcaaaggaagatggagtagaggatgcatttctaggactgtttctctttagaaatagcatccagaatgtccctgaatggtgctgggcactgggaacacacattaaacattagccatctctggtactctcacctagaatgaatgatggttaatatttcccctttaagccttccttaggaaaatggaggtgaaaggtagcaaggtagcttgcacaaggccacagccctgagatagggcacagcacgatccaaacatgtctctggattctgcaggcgatgcctctcctgaggatctgcacatgctgctgtacgtgaatggtggggggtactaagaagttgtagttcatacttccccaccacataccactgatttctagaaagaggaattttctcttgtaatacttgatgtaactctaggactctggacagacagtgaccctatcagcaggaagagaaggcctgaagaatcccaggattccacgatcttccatgtcagtgtgccacagccatgtggttgagagtccaagtatgtgagactgggggatagttaatacaactgtgctaggagggaagcgactatatcagtacttcagactcagctgaactctctcccaggccctgcaaaggtgtctagatgggtcctatccttcttagtggccttcctagcttggtcccaaagagcctcctgcatccactgggtggtgtgggcagacaagtcatgtgacaaatggaagttcacccttgcagtaccaaaagtccagcccatgataatgcaggctgcaggaaacactcctgtcccaggctgtcatttggacatatgaagcacatccttctgggtaatgtagctcttcaccttatctgaggcaatagctaagtagcatccagaggaccactaggaagaagcatcaaaagacttccatgagagtggtacttcacatcagttcgtatgaaccgggctttcttgcatggatagttgttcaatttggtgtttctgtagggaggaggggatgatcactagaggattcttttcaactattttatcctacttcctcccaaaacatgtatttttttctaaacatgtttttgggtctttttaaaaatacgtctgtcttgtcaagtgttcctttactctcttgaacatttcatacaattttaataacttttaatatacttctttcccaattctaccatgtgtgtcatttctgggtctgtttatactggttgattgttctgataataggttatacttttctgcttctttgcctgcctggtaattattttttcaatgcaaaatattgtgaaatttaattttttaggtgctggataactctgcatttctacaaatattcttgagttttgttctgttactcagttaagttatttggaaatagtttaatccattggaaactttttgcaagttttgttaggtggcacaaaggcagccatatgcaaagtgaattttatataatacctttcttgagttatctacttgtctccccatgaataaccagggtattcctctctggctttaggaatacaaagtatttccagccctgtgtaaattccagacattgcttccccctgctcctttcaggtggttgttccctagtcttgggctattttctcacatgcataaacagcagtattcagtgaggacttaacagggactttctgcagaaccgtgaagatctctctgtgcagctctctcctctgtagtctcctgtcctgaaaatgtagccaccttggccaccgtagagtcctaactctgtctcaggagctcagagactgctgattttccctgggattcccccttcctgctttgcagtctggaaattctctgaagggaatctgaggcaattacttggttccttgtttccctctcccagagatcactcttctgtgctgcctgatatccaatttctgaaaattatcatttttgttgagtgttcgatgttctaggtgggagtgtaaatctggcccatgctacaccattgtggccagatacagtaatctttttgtcttgttttgatgtcttatgacattctatttgactacaaacatggggagagtgttatttcttataataaatatcatgccagagtaggcaaagaacgtaatggaattaaggatttcaggagtaactgtggattttggcgggggggggggggcaatatatgcaaatatttattgataatttctaggtggaggatgtttctttaatgactaaattttttcccttatctagcttacatttggtagtggcagagaaataacaaaaaagatagcccaacaaatatgagcatgttagcagagaaagcagggaaaggagggaggcaattggagggcagaaagtgggtagaagagatacagccagagaaactaataatgtggcattggagtggtgtcctgaagaaaggttcggattgagttttcacgtttgaaacatatgttagcattccaggttttgtgctaagtggtaggttcatgaatgactactacattgttaataatcaatcattcattgaagactgaactcaaaacttccctaggggaagagagtttcagaatataagatttgtcacttcctagcatcttcaccattcctctcctctcttttcatttcccaccatttttcatagttctccttgccattccttgtaatatatatttgttcatttgtttgttttccggagacagggtctcagtctgtcacccaggctggagtgcagtgatgcagtcataactcactgcagcctggaactcctgagctcaagcgatcctcccatctcagtctctggagtcactgggaccacaggcatgcaccaccacacctggctaattaaaaaaaaaaatgtagacatggagtcttgctatgttacccaggctggtcttgaagtcctgggctcaagcagtgctcctgccttgatctctcaaagtgctgggattacaggtgtgagccatcatgcccagctcttgtagttttttgatttttatactctacttatcactccaggacagtctttattactcacttcctttgttgttctttgtcacctcctgccaagctcagcttccctgccactcttcctctgtgtccaccaccccctcgctttgcatcattcctccccttcattctctgtgtgggctgtgccccccttccaggctctatattggcatcgcctctagggaagggtttgcccagtttatggtgccagcagcagagtgtgtgagcacttgtttctccacattctgacacattgcttgtcagacattttgtccttgccagtccaatagaagagacaaaaagccatcccaggataaatgttttaatggtgcagagacttattgaattaacctcgattcatgatgtcctccgataaacttcttcattgaaggattattagtaatgtagtagtcattcatgaacctaccacctagcacaaaacctggaatgctaacatatgtttcaaagccactttttttggttgttttctttgaacttttctgctaggaacatttgctccttttcccaccagtatgttggtctttttcttatcatttgtaggagctgtggagggactccatacatactaggaaaataagccaattgtaatatgacttgcaaatatcttcaccataattttctcctaacattttgaatttttttgatgcagttggccatgcataatatttcattttttatgcagtcaaattgatcaatttgggttttttaatctttgcaatggtcttctttcttctgagattctaaaagatattcttctttatttttttcccaagagtttcatgggattttttttcttactctttcaatgtagaaatatttcagagatctgaagttaattttgaagtaggctgtgagaagtagagccaactgtttaattccctcagatgtttaatcagtagattcaacaccactttatttacaaaaaatccagatcgccttgattagcaagttaccttttttcacaaaattttgattatttagatgtatttctgtctttccattgagagttcacttattggtgcatgctcacatgcatatgtgtgttttaaagaatacttcatagggcttcttgtccctaatactctattttaaaattctttctcagcattttcacttatttttctaagtatattatgaatgtcatttaaatgaaccatccaatagtagcattttgagttttgtttctttcattcatcttaatccacgtgagactcttctatgttgttgcatgtgtcaatagtttgttcctcttgtggcttcatggaattcaactgcatgagtgtaacacactttgtgtatccatccaccagttgaacaacatttgagttgtttccagtttcaataaactgaaatctgagtaaaactgttataaatattgctgatcagggttgttgttgttgttgttgttttttgagatggagtctccctctgtcgcccagactggagtgcagtggcgtgatctcggttcactgtaacctctgccacccgggttcaagcgactcttgtgcctcagcctcctgagtagctgagactacaggtgggtgccaccacacccagctaatttttgtatttttagtagagacagggttccaccatattggacaggctggtctcgaactcctgacctcgtgatccacccgccttggcctcccaaagtgggattacaggtgtgagccagtgcccgaccgctgattaggttttttatgtgaacataaatcttcattctcttgggtgaatacttagaagagggattgttgggtcatgataaatggaagattaattttataaggataaagtacatctttttctttaaaataaatctcgttagaagaactcaaacaactccacactaaaaaaaacaaagagacaaataatcccattaaaaattgggctaaggacatgaacaaacatttctcaaaatgtgacacacaaatggccaacaggtgaatgaagaaaatgctgaacaccactaattatcagggaaatgcaaatcagaactgcaatgagatatcatcttaccccagctagaatggctgttattaaacagacaacaaaaataacagatgctagtatggatgtttagaaaagataacacttatacactgttgcctggaatgtaaattagtgtggtcactagggaaaatagtatggtgatttctcaaaaacctaaacaactaaaaatggaagtaccacatgatccagcaattcccctgctggacatttatgcaaaggaaaattaatcagtgtatcaaagagatacctgcactcacatatttattgcagcactattcacaatagcatagatatggaatcaacctaagcattcatcaacagatgaatggataaagaaaatgtggtgtatatacacaatggaatagtatatggccataaaaaagaatgaaatcttatcattcacagcaacgttgatgacatggaggtcattatgctgagtgaaataagccagacacagaaagacatactgcatattctcacttccatgtgggagctaaaaaagttgatcatggaggcagagattacaatgatagatatcagaggctgggaaggggagggaatgaagagagctaggttaatacaggtagataaaatatataagctcattctttgatggcagaatagaatgactataggtaacaacaatgtactgtatattttaaagtatccagaaaaaaggatttgaattgtctcaacacatgaaaataacaaatactcaaaatgatggtgatgtagtttggatgtgtgtcccctccaaatctcatgttgaaatgtgatccccagtgttggaagtggggcctagtgaaggtgttggagtcatggtggtggatccttcttgaatggcttgggaccattcccagtggtaacgcgctcacaggagatctggttgattaaaagagatggggacctccctgctcttggtcccactctcacatgtgacttgcctgttatagctccaccttctgccatgaatatgagcttcctgaggcctcatcagaagctgagcaaatgctggtgccatgcttgtacagcctgaagaactgtgagccaaataaacctcttctctttacaaattaccctgtgtcaggtctttctttaaagcaatgcaaaatgggcaaatagagatagaggcctgatgtggtggctcacacctgtaataccagcactttgggaggtcaaggaaggagaattgattgaggcccagagttcaagaccagcctgggcaactgagtgagatcttgtctctacaagaaaactgaaaaaattagccaggcacagtggctctcacctgtggtcccagctactcaggaggctgaggcaggaggatcacttgaacctaggaactcaaggctgcagtgacctagtattgtgtcactgcactccagtctgggtgacaaagcaagacctcatctcttaaaatacatagatagatagatagatagatagataccacatatactgttacttgatcattaacattctatgcatgtaacaatattatgcataccccattaatatctacaatattatgtatcaattttaaaaaaatcttattggtattttcattgttattacattaaactggcttctatttttaccagaaaacgcacctttattctattgaaaattcccattcaatattttcatttatttaaattctgtttatatttgtccctcatgaggattttagagttaaaaaaaaatagtcattagttggagggatctggcaagatggccaaataggaacagctccggtctgcagctcccagcgagaccaatgcagaaagtgggtgctttctgcattctcaactgaggtaccttgttcatctcattgggactggttaggcaataggtgcagcccatggaaggtgagcagaagcagggtggggcgttaccttacctgagaactgaaaggggccagggacctccctcccccagccaggggaagctgtgagggactgtgctatctggcccagatactatgcttcttccacagtttttgcaatctgcagaccaggagattccctcacgtgcctacaccactagggccctgggcttcaagcacaaaactgggtggctgtttgggcagacactgagctagctgtaggagttttcataccacagtggtgcctggaaccccagagagacagaaccatacactcccctggaaagggggctgaagccagggagccaagttgtcttacttgatgggtcccactcccacagaacccagcaagctaagaaccactggcttgaaattctcactgtcaacacggaagtctgaagtcgaccttggatgatacagcttggtggggggaggggtgtctgccattactgaggcttgagtaggtgggtttcccctgaccctgctaaggactggcctgaactaaacacagtgaggcaaagtgactgtggtcagactgcctcgctagatcctcttcactaggtggggcatctctgaaagaaaggcagcagctccagtcagaggctggcttataaataaaaactcccatctccctgggacagagcacctgggtgaaggggcagctttggacacagcttcagtggacttaaacgttcctgcctgttggctctgacaagaggagtggatcctgacaaggaaggttctcccaacacagtgcttgagctctgttaagggacacactgcctcctcaagtgggtccctgacccccatgcctcctgactgggggaaacctcccaacagaggttgacagataccccatacagaagaactctggctagcatcaggccggtgcccctctgagacaaagcttccagaagaaggagcaggcagcaatctttgctgttccgcagcctttgctggtgatacccaggaaaatagggtctggggcggacctccagcatactgcagcagacctgcagaagaggggcctgttaaaagaaaaactaacaaacgaacacaataacatcaacatcaacaaaaaggacccccctacacagaaaccccatccaaaggtcagcaacctcaaagatcaaaggtagataaatccatgaagatggggagaaaccagcccaaaaatgctgaaaattccaaaaaccagaatgcctcttctccaaatgattggaacccctctccagcaagggcacaaaactggacagagaatgtgtttgacgaattgacagaagtaggcttcagaaagtgggtaataacaaactcctctgagataaaggagcatgttctaactagaataacaagtttagagaagaacataaatgacctgctggagctgaaaaacacagcacaagaacttccttaagcatacacaagtatcaacagctgaatcaatcaagcagaaaaaaggatatcagagattgaagatcaacttaatgaaataaagcatgaggacaagattagagaaaaaagaatgagaaggaatgaacaaaatctccaagaaacatgggactatgtgaaaagaccaaaccaacgattgactggggtccctgaaagtgatggggataatggaaccaagttggaaaacacacttcaggatattatccaggagaaattccccaacttagcaagacaggccaacattcaaattcaggaaatacagagaacagcactaagatactccttaagaagtgcaaccccaagacacataattgtcagattctccaaggttgaaacgaagaaaaaaatgttaagggcagccagagagaaaggttaggttacctacaaagggaagcccatcagactaacagcagatctgtctgcagaaacccttcaaaccagaagagggtggggcccaatattcaacattcttaaagaatttttaatccagaatttcatatccagccaagctaagtttcataagtgaaggagaaataaaatcctttgcaaacaagcaaatactgagcaattttgtcaccaccaggcctgccttacaagagctcctgaaggaagcactaaatatgaaaaagaaaaactggtaccagccactgcaaaaacaccaaaatataaagacaagtgacactataagaaactgcatcaactaacatgcaaaataaccagctagcatcatgatgacaggatcaaattcacacataacaatattgaccttaaatgtaaatgggctaaatgctccaattaaaagatacaaactggcaagttggtagagtcaagacccattggagtgtgtattcaggagactcatcttacatgcaaagacatatatagactcaaaataaagggaatgaggaatatttaccaagcaaatggaactcaaaaaaaaaagcaggagttgcaatcctagtctctgataatacagattttaaaccagcaaagataaaaaaagacaaagaagggcattacataatggtaaagggatcgatgcaacaagaagagctaactatcctaaatatatatgcacccaatacaggagcacccagattcataaagcaagttcttagagacctacaaagagacttagactcccacacaataataatgggagactttaatagcccactgtcaatattagatcaacaagacagaaaattaacaaggatattcaggacttgaactcagctctggaccaggcagacctaatagatatctacagaactctccaccccaaatcaacagcatatacattctactcagcaccacacagcacttactctaaagttgaccacataagtggaagtaaaacactcctcctcaacaaatggaaaagaacagaagtcataacaaacagcctctcaggacacagtacaatcaaattagaactcaggattaagaaactcactcaaaaccacacatctacatggaaactgaacaacctgctcctgaatgactaatgggtacataatgaaattaaggcagaaataacgaagttctttaaaaccaatgagaagaaagatacaactggctgggcacagtggctcacacctgtaatcccagcactttgggaggccaaggcagatcacgaggtcaggagattgagaccatcctggctaacactgtgaaagcctgtctctactaaaaatacaaaaaattagccgggtgtggtggcgggtgcctgtagtcccagctactgggagactgaggcaggagaatggcatgaacccgggaggcagagcttgcagtgagccgagatcactgccactgcactccagcctgggcaacagagtgagactctattctcaaaaaagaaagaaagaaagaaaaagagagagacgaaagaaagagagaaagaaagagagagagaaaaagaaataacataccagaatctctgggacacagctaacgcagtgtttagggggaaatttatagcactaaatgcccacatcagaaagcaagaaagatctaaaatcgacaccctaacatcacaattaaaataactagagaagcaagagaaagcaaattcaaaagctagcagaagacaaaaaataagtaatatactaccagaactgaaggaactagagacatgaaaaacccttcaaaaaatcaatgaatccaggagctgggtttttttttttttaagtttttatcatgtttatttaactacaggtataggatgaagatgcacttcaaatatcatgggaaattaaatattctgtgttggtctactcttttaaatttcagtgtacctcttcttaactaaagagaaatgtcttaaacctctttacactttacatccattttatgcatttagattcttctccagtatttcatttattcatttttttttattattatactttaagttttagggtacatgtgcacaacgtgcaggtttgttacatatgtatacatgtgccatattgttgtgctgcacccattaactcgtcatttagcattaggtgtatctcctaatgctatccctcccctctcccccaccccacaacagtccccagtatgtgatattccccttcctgtgtccatgtgttctcattgttcaattcccacctatgagtgagaacatgcggtgtttggttttttgtccttgtgatagtttgctgagaatgatggtttccagcttcatccatgtccctacaaaggacatgaactcatcattttttatggctgcatagtattccatggtgtatatgtgccacattttcttaatccagtctatcattgttggacatttgggttggttccaagtctttgctattgtgaatagtgccgcaataaacatacgtgtgcatgtgtccttatagcagcatgatttatagtcctttgggtatatacccagtaatgggatggctgggtcaaatggtatttctagttctagatccctgaggaatctccacaccgacttccacaatagttgaactagtttacagtcccaccaacagtgtaaaagtgttcctatttctccacatcctctccagtacctgttgtttcctgactttttaatgatggccattctaactggtgtgagatggtatctcattgtggttttgatttgcatttctctgatggccagtgatgatgaacattttttcatgtgtcttttggctgcataaatgtcttcttttgagaagtgtctgttcatatcctttgcccactttttgatggggttgtttgtttcttgtaaatttgtttgagttcattgtagattctggatattagccctttgtcagatgagtaggttgcaaaaattttctcccattttgtaggttgcctgttcactctgatggtagtttcttttgctgtgcagaagctctttagtttaattagatcccatttgtcaattttggcttttgttgccattgcttttggtgttttagacatgaagtccttgcccatgcctatgtcctgaatggtaatgcctaggttttcttctagggtttttatggctttaggtctaacatgtaagtctttaatccatcttgaattactttttgtataaggtgtaacgaagggatccagtttcagctttctacatatggctagccagttttcccagcacaatttattaaatagggaatcctttctctgctgcttctttttgtcaggtttgtcaaagatcagatagttgtagatatgcagcattatttctgaaggctctgttctgttccattggtctatatatctgttttggtaccagcaccatgctgttttggttactgtagccttgtagtttagtttgaagtcaggtagcgtgatgcctccagctttgttcttttggcttaggattgacttggcaatgcgggctcttttttggttccatatgaactttaaagtagttttttccaattctgtgaagaaagtcattggtagcttgatggggatggcattgaatctataaattaccttgggcagtatggccattttcacgatattgattcttcctacccatgagcatggaatgttgttccatttgtttgtatcctcttttatttcgttgagcagtgttttgtagttctccttgaagaggcccttcacgtcccttgtaagttggattcctaggtattttattctctttgaagcaattgtgaatgggagttcactcatgatttggctctctgtttttctgttattggtgtataggaatgcttgtgatttttgcacactgattttgtatcctgagactttgctgaagttgcttatcagcttaaggagattttgggctgagacgatggggttttctacatatacaatcatgtcatctgcaaacagggacaatttgacttcctctgttcctaattgaataccctttattcccttctcctgcctgattgccctggctagaacttccaacactatgttgaataggagtggtgagagaggacatccctgtcttgtgccagttttcaaagggaatgcttccagtttttgtccattcagtaggatattggctgtgggtttgtcatagatatctcttattattttgagatacgtcccatcaatacctaatttattgagagtttttttagcatgaagagttgttgaattttgtgaaaggccttttctgcatctattgagataatcatgtgttttttgtcttttgttctgtttatgtgctggattacgtttattgattttcgtatgtcgaaccagccttgcatctgagggatgaagcccacttgatcgtggtggataagctttttgatgtgctgctggatttgctttgccagtattttattgaggatttttgcatcaatgttcatcaaggatattggtctaaaattctcttttttggttgtgtctctgcacgactttggtatcaggatgatgctggcctcataaaatgagtcagggaggattccctctttttctattgattggaatagtttccgaaggaagggtaccagttcctccttttacctctggtagaattcggctgtgaatccatctggtcccggactctttttggttggtaagctattgattatttccacaatttcagagcctgttattggtctatttagagattcaacttcttcctggtttagtcttgggagggtgtatgtgttgaggaatttatccatttcttctagattttctagtttatttgcatagaggtgtttgtagtattctctgatggtagtttgtatttctgtgggatcggtggtgatatcccctttatcattttttattgtgtctatttgattcttctctctttttttctttattagtcttcctagcagtctatcaattttgttgatcatttcaaaaaaccagctcctggattcattaattttttgaagggttttttgtgtctctatttccttcagttctgctctgattttagttatttcttgccttctgctagcttttgaatgtgtttgctcttgcttttctagttcttttaactgtgatgttagcgtgtaaattttggatctttcctgctttctcttgtgggcatttagtgctataaatttccctctacacactgctttgaatgtgtcccagagattctggtatgttgtgtctttgttctcgttggtttcaaagaacatctttatttctgcctttattttgttatgtacccagtagtcattcaggagcaggttgtttagtttccatgtagttgagaggttttgagtgagtttcttaatcctgagttctagtttgattgcactgtggtctgagagacagtatgttataatttcggttcttttaaatttgctgaggagtgctttacttccaactatgtggtcaattttggaataggtgtggtgtggtgctgaaaaaaacgtatattctgttgatttggggtggagagttctgtagatgtctattaggtccgcttggtgcagagctgagttcaattcctggatatccttgttaactttctgtctcattgatctgtctaatgttgacagtagggtgtgaaagtctcccattgttattgtgtgggagtctaagtctctttgtaggtcactaaggacttgctttatgaatctgggtgctcctgtattgagtgcatatatatttaggatagttagttcttcttgttgagttgatccctttaccatatgtaatggccttctttgtctcttttgatctttgttggtttaaaatctgttttatctgagactaggattgcaacccctgcctttttttgttttccatttgcttggtagatcttcctccatctctttattttgagcctatgtgtgtctctgcatgtgagatgggtttcctgaatacagcacactgatggatcttgactctttatccaatttgccagtctgtgccttttaattggagcatttagcccatttacatttaaggttagtattgttatgtgtgaatttgatcctgtcattatgatgttagctggttattttgctcgttagttgatgcagtttcttcctagccttgatggtctttacaatttggcatgtttttgcagtggctggtacaagttgtccctttccatgtttagtgcttccttcaggagctcttgtagggcaggcctggtggtgacaaaatctctcagcatttgcttgtctgtaaagtattttatttctccttcacttatgaagcttagtttggctggatatgaaattctgggttgaaaattcttttctttaagaatgttgaatattggcccccactctcttctggcttgtagagtttctgccgagagatctgctgttagtctgatgggcttccctttgtgggtaacccgacctttctctctggctgcctttaatattttttccatcatttcgactttggtgaatctgacaattatgtgtcttggagttgctcttctggaggagtatctttgtggcgttctctgtatttcctgaatctgaatgttggcctgccttgctagattggggaagttctcctggataatatcccgcagagtgttttccaacttggttccattctcctcatcactttcaggtacaccagttagacatagatttggtcttttcacatagtcccatatttcttggaggatttgttcgtttctttttactcttttttctctaaacttcttttcatgcttcatttcattcatttcattttccatcactgataccctttcttccagttgatcacatcagttactgaggcttatgcattcatcacgtagttctcgtgctgtggttttcagctccatcaggtcctttaagcacttctctgcattgattattctagttatccattcgtctaatttgttttcaaagtttttaacttctttgcctttggtttgaacttcctcctttagctcagagtagtttgatcttctgaagccttcctctctcaactcatcaaagtcattctccgtccagctttgttctgttgctggtgtggagctgcattcctttggaggaggagaggtgctctgatttttagagtttccagtttttctgctctgttttttccccatctttgtggtctttgatgatggtgacgtacagatgggtttttggtgtggatgtcctttctctttgttagttttccttctaacagccaggaccctcagctgcaggtcattggagtttactggaggtccactccagaccctgtttgcctgggtgtcagcagtggtggctgcagaacagtggatattggtgaaccgcaaatgctgctgcctgatcgttcctctggaagttttgtctcagaggagtacctggccgtgtgaggtgtcagtccacccctactggggggtgcctcccagttaggctactcaggggtcagggacccacttgaggaggcagtctgcccattctcagatctcaagctgcatgctgggagaaccactactctcttcaaagctctcagatggggacatttaagtctgcagagtttattgctgtcttttgtttgtctgtgccctgcccccagaggtggagcctacagaggcaggcaggcctccttgagctgtgggctccacccagttcgaagttcccacccactttgtttacctactcaagcctgagcaatggtggacgcccctcccccagcctcgctgctgccttgcagtttgatctcagactgctgtgctagcaatgagcgaggctccatgggcgtaggaccctctgagccagatgcaggatataatctcctggtgtgccgtttgtgaagcccattggaaaagtgcagtattagggtgggagtgacccgattttccagatgctgtgtgtcacccctttctttgactgggaaagggaattccctgatcccttgcacttcccgggtgcggtgatgccttgccctgctttggctcacgcacagtgcatcacacccactgtctggcactcccctgtgagatgaacctggtacctcagtgggaaatgcagaaatcacccatcttctgcatcactcacgctgggagctgtagactggggctgttgctatttggccatcttggctccacccatggagctgggttttttttaaaagattaacaaaatagatagaccactagccagactaataaagaagaaaagagagaagaatcaaatagacacaataaaaaatgataaaggggacatcaccactgatcccacagaaatacaaactaccatcagagaatactataaacacttctatgcaaataaactagaaactctagaaaaaatggataaatttttggatgcatacaccctcccaagactaaaccaggaagaatttgaatccctgaatagaccaataataaattctgaaattgaggcagtaattaacagcctaccgacagcaacaaaaaaagcccaggactagatggattcacagccaaactctaccagagatacaaagaggagctggtaccattccttctgaaactattccaaacaatagaaaaagagggacttctccctaactcattttatgaggccagcatcatcctgattccaaaatctggcagagacacaccagaaaagaaaatttcaggccagtatccctgatgaacatcgatacgaaaatcctcaataaaatactggcaaactgaatccagcagcacatcaaaaagcttatccaccatgatcaagttggcttcatccctggaatgcaaggctggttcaacatacacaaatcaataaatgtaatccattacataaacagaaccaatgacaaaaaccacatgattatctcaatagatgcagaaaaggcctttgacaaaattcatgctaaaaactctcaataaactaggtattgatggaacatatctcaaaatgataagagcgatttatgacaaacccacagccaagttgaagttgcttatcagcttaaggagttttggggctaagatgataggcttttctaaatatacaatcatgtcttctgcaaatagagacaatttgacttcctctcttcccatttgaataccacttatttctttctcttgcctgattgctctggccagaacatccaatactatgttgactaggagtggtgagagagggcatccttgtcttgtgccggttttcaaaggtaatgcttccagtttttgcccattcagtgtgatactggcccctaaatctgtccctggaagctgctgacagatcaccatagggggcagaatgggagagagtggggcaaggataggagggccatctgtttcctccttcccactctcacctgtctggaagcacagctctctgatcaccagcaaggccagcacaagcagtgcccccttcatcgtgttgtctactggagtgttctgctcagggcagggcttctgctgctttataaacaaatgcccgtgggctgggacctggcacatgtgctttcctcacctgagaagtggtgcccacaggaagcccctcccactctgtggaaacaaagggctaaagatgttgatccagctgctgttgattctgctgctggtggctttggagagaagcagttgtaccttggccaaggagcaactgcagctgacctttctaagtggcaccattcagccccaaatgctctgttgtcccacccccaactgtcacctctgctttctggccacattcttcccccacctttcctggctccaaaagtagcactctcccaaaattaggagataaaaaccacagaaggtccaaggacaggtttatgccactgtaggtagccaaaataccatggagaaccttctttaggaaaacagtttcttggcacaaacaagatgagattgtctatgaaaattctagcagaaggaggcctgagaaagctccgaaggatcaaatgtggaacaatctgagcaatgaaataaatcacatagtatgggattataacccagagtataaaatagtataaaataacatacggttggccctttgtatgcgtgggtttcacatctgtaggctccacatctgttcattcaactgagcatagattgaaaatacttggggagtaggggagggaattccacacaatttcaaaaagcaaaacttgaatatatcccataccgagcgctatcttgaatccatgtgaaggaagttgtatgtgggcattgcattaggaattataagtaatctaggaatgacttaaaagtgtactggaggatgtgtgcaggttacatgcaaatactatgccattctatatacggaacttgtacacctgtggattttagtgtccatgggaggtcctggaaccaattccccataaatccaaagggacaactacatgtgagtctatactgataaaaataaatgattatgttctcactcataagtgggagctaagctatgatgatgcaaaggcataagaatgatacagtggatactggagactcaggggaaagggtggcagggaggtgagggataaaagactatacactgggtgcagtgtacaatgcttgggtgatgggtgcaccaaaatctcagaaatcaccactaaggaacttattcatgtaaacaaacaccacatgttccccaaaaacctattgaaataagaaaagaaacaaaaaaaacagggaagaaaaaaaatacaaataaatgattgaacaaataaataaatgagaaagaaaagacagatattccttacagaataattccaaattatatatatatagatcctcccctccctgctactgttttccccatttcctacttttttctttttcttttttagagacagggtcttcctctgtcacccaggctggaatgcaattgcgtgatcatagctcactgcagtctcaacctcccaggctctcaagcaatcctcctgcctcagcctcccaagtagctgggaccacagtccaccacactctgctaattttgttattttttaagagacagggtctcactatgttgcccaggctggccttgaactcctgggcccaagggatcctcctgcctctgcctcccaaagtgctggtattgtacacttgagccaccacacctggccaccctactcttgtcttcagaaacatctagccaccatcaagcttactgccctcccaccttgagtatgtgctggatgtttcccaagaaaatagtagggaaagggaaaaacagtagagaaagccaacacagatgacactaatcaagtgataagtgataaccagtgcctagacattgatgtcacagggtcctgcacttccagggtgtgttccctaaaatcctaatcccaatgtaaatattatgagaaaaaatgccaaactcagcttggtgggcatttgacgatgtccaccacctcaacactaccaaggccataaaaaagcaaggcaggactaagacagtgtcacacaccagaagacatgatgaacagctgacagctggagctcattgcttggcacctctcaaccaagagcccttaccagacatgaatcctgttttgtacaaggttctaatcaaggccaaaaaccttgcattctacctttgactctgcagcttcagcaaaccttattctgtcactactgactcagagaaaaggtcagccaagaacctctagccaaaaactgccttattctgaactgacaaagtactgaaaactttcactttatttaactaatacaaagcaatttaataagcaaatatacagtaagtatctgtaaaagttcttgttcatagactccagaggccaggcacagtgactcatgcctgatgagtgtctctcccagcactttgggaggctgaggtgggaggatcgcttgagtccagaagtttgagatgagcctgggcaagatggggaaaccccatctctacaaaaactaaaaataaaaaagttagccaggcttggttgtgcacacctgtggtccctgcgacttgggaggctaagatggatggcttgagcctgagaggttgaggctgcagtgagctctgattgcaccactgcaatccagcctgagcaacaggagactctgtcttaaaaaaataagaaaccaaaataagttttaaaaatatgtagtttatagactccagagcaatggggatgtcccttcaattcatctaacagacatttatagagcatctactttgtgttggtcctggtctgagccctgaggatgtagcagcacattggagctcctcatacatctatgggtagggggagataatcagcaaatggaaagacacaggccttttcctgccccactgtgagacctggcacaggtataaaagggcctcaaatggggcctgacgaacttgccactggcaccatgaagctggctcctactttcgggctgctcttcactgccgtgctcctgatctccagggcaagtaggtgccaggctgtgaatgcctggggatgtggatgctggggctttgatggcatccaagggcagttttgagcatacatggagggaaagggatgtgtaggctctgatgagtgtctctcaagggtctgtccacgtgtcattgtgttccagattgtgacatctgcccagttgtgacaaaggatgttgatctcttcctggtgggaacccctgatgaatatgttgatcatgtggcacaatactgaacatcctcattaatattgtccaatgctagaaagctgaagaactgtttcaatggcaaattggcagacgaggacaagaggcatgtgctcagtgggctggtgagtgcagctgtgtgtgcctgcaccttagtctgggtggagggtctgctggttctagggcagtgggtgggagtgcttattctcctcccaccaacttaccattatgatatgtaattgagactactggaaatagatttacatgtgaggtgtgtagcaacagtaaaatgtattttaataaaaggttataagaggcataaaaatataaattcttgcctagggttaaagaattgttttaaattagaaaatatgaagttaaaagttcaaacaagtggtagaaagtgtaaaaataaatcttgcaaaaattctatgtatgaatatattgactaaattcaaaagggtattatatggtttttctctaaattcagcattaaaataagagcatgacaaggtactctcccaccaaggcctttccctgggaatctgggaggaaaaggaacctcgtgaatgaggaggtagagaggagggagcagacaccaatgacgcagggaagggccaggaagggggattcagctagcccttgagcttgtgggctggctctggctgttcagctctgtaggctagcctgggaacctccaggacctcctgtgtccatggcaccactcaacctcaattttagacccttggctctgacctcctggcctacagcctctcgagcacatgagactctccaaaccatgagccctgggtctttctaatacaggatttattaagaaattatttttaggcagctagaaagggtaaaagttctcggtggaattttcctttaataaaaagcagccccaaaccatttcttctccgacagaaagcagcctgatatatatgaaaactaggagctttcatatgtaaatgccagcagcggtacctggaagccaggtacattgaatatggtggttcctgctctccttttccttgtcaccgtgtgtgtaggaatcatggtgacccaccaggtagaaccacatttgcataataaaagagtagggtgggaaggccagtctttttgcaggctatgcaaatggaacgtctagtcaaaccaatcccctgggccctatgtaaatcaatcaccacctccctaagcctctgcacaaaatcgattgcatcctgctgcaaactggagaccctctcttgggcgacctgctttctcagcatgaggaagccttttctctctcttcttcttctttgtctattaaactttctgctcctaaacccactcctcatgtgtattcgcgtcctgaatttttttcgactgagacaaagaaacagggtatataccccagtcaaccaagctgtttcatctggcggttctcatccaggatcaggatcagaatggaagatagaaacatcggactggtgagtatggagtgagcctcaaatctgccctttaatctcaaggctgtcttcaaaccagtttttttttttttttccacagagttcctagccatcacatgaggctgggagaagtcctagggcaactgagaatttctgtccagggcacaccctggcattattcaaaggcttcgggactgaacccagcctccaacagcccatccaagtgttgatcatggatctccagctatcctgtcacaaaattttcctttcttttctatctgctgtcactatgtctcctatcctctgtgtgtgcagtgtgcaggaaattttacagttcagggaaacagttctgttaggaaagatcagcaaacaccacgtgcagcaactcaacaagcatctctatcctgcctctggcgagcacatgttatttctaagccaacagcgccacctagtggaaatataaatcctcttcatgtggcaaatcgccggtgttttacagtaatactgcagcttctcaattctttctttttgcaccgctagaaatcagcctctaaggtctttctgtgaatgggaaagctccaacttcaacaattaggaggaaaatgtccttcacagccaaatgttagcgcccatactgtgccaacagcaggaaaaatcaccattaggtccctacgttcatttctgtctccaatgagagcagtacttaattagtaaagtgattttaagtacagaggttaaacagaaccattttgctatgggtaaatattttagcacaggccataatagcaggtaatttagcacactgactctgttaaagaaggcttgcccaaaggggacacagtctctccagagatccatttcttcaggaagccaggcagatcacacagatcgataagctaaggcagtgtgggtaaagcatggttaatcccataacttagttcataaggttccatgacttggaggaccacgcctacaacaatgggcagcacagttaacacaatgctgggacacaggaaccaaggagagaaaactgttggggggatgctcccactgtcttcctctccaccctaggtcacagtgaaaggacacctagggagtagaaacagagggacaaaagaactacagggcaaacaaaaatgttaacaaaatggcaatagtaaatggtaggagacttccacatgtcacatttaataatagacagaccatctagacagacaacgtataacagacttaaacaaaatcatagaacaaatggatctaccagacacacacagaactttcctcccaacagcggaagacattctcctcaagaatacacactacagtctccaggatagaagacaagttaattcgaaaacaagtcttaacaaatttaagatcagaaccatattcagtgtcttttctagccacggtggaatgaaaccagaaatcaaaactggcaagaaaacagggaagtttatatatatgtggaaaaattcaaaatttcttgacacaattgctgcacttctgatcaaatggctcttgcagatatttatagactatttcatccaacagctgcaaaatattatttctttccataagaacatttaacaaagaatgagtatttgataggaaaacaggatgactatagttaataatcatttaattgtatattttaaaataactgaaaaagtataatcagattatttgtaacacaaagaataaatccttcaggtgacggataccccattgactctttttcttttttttttttgacagagtctagcactgttgcctgggctggagtgcaatggtgcaatctcggctcactgcaacctccgcctcctgggttcaaatgatctcctgcctcagcctcccaagtagctgggattaaaaatacaaaaaataaaaatttttgtatttttagtagagacggggtttcactatgttggccaggctggtcttgaactcctaaccttgtgatctgcctgcattggcctcctgaagtgctgggattacaagtgtgagccaccacacccagcctcccgttgactcttatgtgattattatacatcgtttgcctgcatgaaaatatcacatcaagtatcatttctgaccacaatgaagtaacactataaatcaaatcaataacaagataaattttctaaaatgaacaaatatataaaaatgagacaatgagcaaataaacaaattaagaagcaaattaaaaaaatttttgaagcaagttaaaatagaaatgccacataccaaagcctgtgtgatccagcaaacacaatattagcaagaattttgataataaatatcttcatcaaaaatgtagaaaaagttcaaataaaacctgcacaacataacaaaatctatagggtactgaaaaggcaataataacaaggtagtttagtagtaactacctacatcaaaaaaaagagagaaagatttcaagtaaaacttaatgcatttcaaggaactaaaagagcaaatacaaaccaaacccaaatttagcaggaggaaagatataataaagatcacagcagaaataaatgaaattgagactaaaaaatagtatagaagattaacaaatgaagagttggttttgttaaaagaaaaaaaatcatcagaccattaactagattgtgaaaaaagacccaagtaaataaaaccagaaatgaaatagtagacatcacaactgataccacgcaaaaacgaagtatcattagagattgctaccagtaactataagctaacaaattagaaaacgtaccagaaatgtgtaaattattagacatataaaatttaccaagattgaaccaagaagaaatagaactcctgaatagagcaattacaagtaatgagattgaacctgtaataaaatgtctccatcaaagaaaaaacccaggctccattttcttccagaattgtacaaaatatttaagaactaataccaattcttcaaaaagtcctccagaaaattgaagggaatgaaattcttccaaactcattctacaaaaccagcaataccctgatggcaaaaccagacaaggacacacacacatacagaaaacaacaacaacaacaacaactataggccaatatccatcatcctcaacaaaattctagcaaaccaaccccaacagcacagcaaaatgatcattccccatgatcaagtgggagttctcccaggaatgcaaggatggttcaaaatacacaaatcaatacatgtgacacatcacatcaacagaaggaagaacaagaaccatacaatcatgtaaatagatgcagaaaaagcatctgataaaattcaactgtgcttcattataaaaactcttaacaaactgggtgtaaaaagaacgtatgccaatataataaatgaaatatatggcaaacccactgccaacatcatagtgaataaggaaatattgaaacgtcattctctaaaatctggaacaagaaaaaaaagtggccactttcaccagttttattcaacatagtactggaagtcctagccagagcagttaggcaacagaaagaaataaagtgcatccagactggataggaggatgtcccagtctctgcttgcagatgacatggtcttgtatatagaaaaacctaaaaggaccaacaaaaactcttagaactgataaagaaattcagtaaaggcacaggatacaaaatcaacatataaaaatcagtagcattcgtacacatcagcaacaaattagtaaaggaagaaattgagaaggcaaactcatgtaaaatagctaccaaaataagaataaatttaacgaaagaggtgaaagacctctacccaaaaagctataaaacgctgatgaaagaaagtgaagaggacatcaaaagtgaaaaggcatcccatgttcatgattggaacaattaatgttgtgaaaatgagcatatcaccaaaagtgatctgcagattcaatgcaatccctgtcaaaatatcaatgatatcttcacagaggtagaaaaaacaatcctaaaattggtaagaaaccacaaaagactcagaataaccaaagcaatcctcagaaaaatgaactaagttggaggcataacacttcttgaagtcaaaatagattatatagctatggttaaaacaaaaacaacacaacaacaaacagttgggcatggtggctcatgcctgtaatcccagctcttagggaggcagaggcgggaggataccttgaacccaggagttcgagacctgcctgggcaacatagtgaaaccctgtttgccacgaaaaggaaaacaaaagaaaaaaaaacagtatgatactgtcataaaaatagacacatagtcaatggaactaaatagcacagaaataagttcacatatttaccatcaacagattttcaacaaaagtgccaagaacatttattggggattggagagtcttttcaataagtggtgctgggaaaactggatattaatatgccaaaaatatgaaaccagacatccatctctaatcatatttttccttaaatcaactcaaaatagcttaaagacttatatgcaagagctgaaactataaaactactagaagaaaatatgcataaaaattttcaggacattggtcttggcaaagattttatggagaaaacccaaaagcacagacaacaaaagcaaaaatagacaaatgggattacattaaactaaaaagcttcagcacagcaaaggaaacaatcaatagagagaagagatgacttgcaggatggaaaaaaaaatatttgcaaactattcatctgacaagggattcatatccagaatatataaggaactcaaataactcaacatggaaaaacacacaaataatctgatgtacaaatggcaaattagctgaagaaatatctctcaaaagatggcatacaaatggtccaggtatttttccagtggtcagcatcaccaatcatcagggaaatgcaaatcaaaaccacaatgagattcatcttacctcagtgggaatggctattatcaaaattgcaaaagataacagatgctagtgaggaagcaaggaaaagggaaaccttgcgtactgttggtgaggatgtaaattaggatagccattatggagaatgatatggagatttctcaaaaaactaaaaacagaattaccacatggtcgagcaatacaattactgagtatacatccaaaaaaaagaaagaaaattagtatatcaaagacatatctgcactcttatatttattgaagtactattcacagccaagatttggaatcaatctcagtgtccatcaacaagtgaaaggatgaagaaaatacagtatatatatgcaatgaaatactgtttagccattaaaaaatcacaaagttctgttatttgcatcaacatggatgaatttggagccattgtgttaagtgaaataagccaggcacagaaagataaatgctgtatgttctcattcatacacggaagctaaaaaagttgaactcatagaaggagagtgattactgatacaaaatgcaactaactagataggaggaataagttctagggttctatagcactataggatgagtgtaattaacaatgtattgttaaagtactgataattctagtaatgttgtaggatacgaaatacacatacaaaaatcagagacatttctatacactgataatgaactatccaaaaaggaaaataagaaaacaattacatttgcagtaacaacaaaaagaataaaatgcttcaaaataaacttagccaaagaggtgaaatacttgcacactgaagactataagacattggtaaagaaaattaaagaagacatatatcagattctatgaatcccaatggcattttttatagaaacaggaaaataatcttaaaatgtttatagaatcgcaaagaagcccaaaaagtgaaaacaatcctgagtgagaagatgaagctggaggtatcaacctaaaaaatgagagaaaacatttgtaaaccatatatttgataaggggttaatatccaaactatataattacctgatacaactcaacgcaaaaaataatccaattaaaaatgggcaaagacctgtgtaggcatttttcctaaaaatacatacaaatggccaatagctgcatgaaaagatgttcaccatcacgaatcatcagggaaatgccaatcaaaaccacaagatgccatctcacacacattagcacggcttctaccgaaaagacaagaaattataagtgtttgcaaagatgtaaagaaattgaaacccttgtgcactattggtagaaatataaaatggtacagcctttatgaaaaacagaatggagctttctcaaaaaattaaaaataggctgggtgcattggctcacacctgtaatcccagcattttgggaggccgaggtgggcagatcagctgagatcaggagtttgagaccagcctggccaacatggtgaaactctgtctctactaaaaatgcaaaaattagccaggcatggtggtgtgtgtctgtaatcccagctgctcgggaggctgagacagaagaatcacttgaacccgggaggcaaagtttgcagtgagccaagatcacaccattgcactccagcctgggcgatagaacaagactctgtctcaaaaaaaaaaaaaaaaaaaaattaaaaatagaactactgtatgatccagaaatcccacttctatgtatatatccaaaaaaaataagatcagtgattggcaccccaaggttcattgtggcattattcacagtcaccaagatagggaaagaacctaaatgtctgtcaatggatgaatggataaagaaaatgtgatatatacaaaagctatctatctatctgtctattatctatctatctatctatctatctatctatctatctatctatctatctatgtatctatcatctgtgttttacaaaatatacaatggaatactattcagccttttaaaaaagagggaaatcctgctactttcaacaacatggatgaacctggaggacattagtgaaataagctagacgcagaaagacaaatcctgcatgatctcacttctatgtgaaatctaaaatgataaaactcatagaatcagagagtagaattgtagttgcctggggccacaaagtggtggtgggtgggatgagtgagaagttgtcagtcaaagggtacaaagtttcagctatgcaagatgcatgagctctggagatctaatgggcagcatggtgaccatgattaataatactgtattgtatagaagaatcccctttatcctcaggggatacattctataactctctgtgaatgcctgaacccatgcatagtactgaaccttctatacaatatactatgcttttttcctatgcgtccatacctatcatagagtttcgtttataaatccaactgagtaagaaattaacaggaactaattataaaatagaacaattataccaatatactgtagtaaaatttacatgaatctgatcagtgtctctctctgaaaatgtcttattgtactgcctcaccaatgtttggactctggttgactatgagtaactgaaactgcagaaagcaaaactgtgaaaaagggaggagccatcatacttgaaatttgctaaaaattgttatcttaagtgtcctcaccagcaaaaaaaaaaaaaaacaaaaaaaaaaaacctgttttctacccctcaaaaaatttcttctgctgttcctttgtactcaaataatctcctcacccttaatcattagtggccactggtgtgctcttatccctatagctttactttttccagaattgctaataagaaaaaccgtgcaatatgtagcctttgagtctggctgacttcaatacctttttgttttaaaattctaaatataatcaaatctatgatgaatatattaattaccttgagtatggtggtcacttcaccctgtaaatatatatcaaattataaagccatacattttaaatatacacaattcctatttgtcaattataccaataaagccagaggtaaaaaagaaatcttattatctagttactatataaaaatatattaaatatattgccacataaaaacctgattattttttattttttatttttttatctcttttttttattattattatactttaagttttagggtacatgtgcacaacgtgtaggtttgttacatatgtatacatgcgccatgttggtgtgctgcacccattaactcgtcatttagcattaggtatatctcctaatgctatccctcccccctccccctaccccacaacagtccccggtatgtgatgttccccttcctgtgtccatgtgaagaacctgatttttaaaaaataaattgggtaatcttatttccagcaattaaaacatctgaaaaaatgagtattaataaagatacttgatacctttagtattttaagattataggtagaatttgtcaatgaggaaattattgaaagaagccagactcaaaaagctacatagtacatgatttcattgataagcagttctggaaaaagcaaggccattggaatgaggaacaagctggtggccactcaggattaagggcaaggagaccacctgactacaaaagcacagcacaaggagcgtctgaagttaggaaacatctctactgttgtagaagtgcctacgactccagacacccgtacaaaacctacataagacagagttctcaaaactcacggaaatgcacatcaaaaagagtgagtttgctgtatgtaaattttttaacatttgaaactcaaaaaaaggtatgaagtattcatactcataagaccaatgaacctgaaagattataagttctgtgaaggaatcagatcaaaaacagtgcatgctctatgagtccatgtacatgaagtgctggaaaatgcaagctaatctatactgacagaaaccaaatcagtggttgcccagagagaaggaaggggacaaggagaggcaggagagaggcacttaaagaggcacaagaaaactttcacaagggataaatctgttcatattttgattgtggtgatgatttttctggttttcacaactgtcagaagttacaaattgtacattttagatatacatgcttcttatatgtcatttatacttcattaaagctgttaaaataaaaaaattaaataaacatatataagatttaaaaatacaattaggaaaaacttaatagaataaggcatgtaataatggaggaatatgcatttttaattgcatgtggatgattaataaaaatgaccacttattagaacataaagtagctctcaacaaatttcaaaggattttaaaatttccagaggatataatttgatctcaatgcaattttcatagaaatcaataacaaaaagtgattgcaaactcttcatatttatagaaattaatgattcaattggctcacttttactgtcacaaataacctgaaaattcaatagattaaaatgacaatcattgatgatgatgacaatcattgatccctcatgtgctgtgggttggctgtgtgatatcctaccttgttttaacctgaaattgactctcccttagctgagagagccggacagactccattttggctccttcacttgcagccccttacctagccccctttcttcaaggacttaacttgtgcaagctgactcccagcacatcaaagaatgcaattactgataagatactgtggcaagctatatccgcagttcccaggaattcacccggttgatagtacccaaagcccccgcgtctgtgtccggttgatggtacccaaagcccctgcgtctatcacctcatgatagatttaaagcccctgcacctggaactgtttttttttcctgtaaccatttatcctcttaacttttttgcctgttttgcttctgtaaaattgcttcagctaggctccccctcccctttccaaaccaaagtgtaaaagaaaatctagccccttcttcagggccaagagaattttgagcactagctgtctctcggtcgtcagcaataaaaggagtcctgaattagtctcagagtgtggcgtttctctacaactcgcctggttacaacatttggaggccccagtgagatttcaccactgggtgagtgctggactcgttctgggctacccccaacagatggcgggcttataggggaagcgcaacctgaagatgttccagcgccctgtaggccactgtcttctggaggggaatggatcgactgccagtgtatgcccaccaaattcaactcctgagtcctcagtctctggtcccaggaaggtgagtcagatctgactttgtttttctgggagggaaacagccgtgacgagggccctccctcagactctgtctacgttccaggatgctggaggacagagtcctggtttctgtctgtcttctctgttaagactagtctgtctgtctgtctgtctgtctctctctctccctctctctccccctctctctccctctgtctctctcccttctctttctctctctctctctcttttatctcttctccttctcttgttcaggtctctaggagacctctgttttagaacaggaataagaattgtaataaactctgtatgagtgagtgagtgaatgtggagttcaagggcttgcgcttgaatttccagtttgtagctccatggtgaaagctatggagtttgagtgggccctcacctgcagttccatggcgacctcataaggcttagggcagcatcaggcatagctcgatccgagctgggggtttacaccggcctgccaatgccaaaaggagcctaagtcctctcctggggagcggccaggcgggcatctgactgatcccatcatgggaccccctccccttgtctgtctataaaaattgctatactaatttatataccccagtgtctatttttctgtttggtctgtctaaatttcgtatgtcaggtcgccgatactgcccatggcgattggacaaggacttcttcaaagtcctcggtacagattttctatcctgggaggaaaaatctctcattagtcattttggctgcccatcccagtcctgccttttctgtcagaaacaaatcaggtgttgttatggggaggggtgtgagaaacattcgcccgtttgggatttctggcaccataaaggttgctggcatttggattgccataccccatgccccaatgactggaccacctcctccttagaccagtggtggattcaaaatagccaccccgcagacctccttgctcaccttttctgtcatcccataacttttcctgtgcccttggataaggcactgtgcggagaaacctgtgcccgtgctgctttactccgtctgcacccttattctattcctctgtggctactctcctaccttaggaaagatctgagtggcccctttcctcctcatccccatcccttacctcacatatcttgtttttctgtgtcacagccagtccagtgcctccaagagttggctctgctctccctcctaaaacccttaaaagaaaaggccaggtttgaactttttgccttcgaatcgtggagacaccaaaaatatttgggctataagtcaaagaggagagggggatcacataggtcccactggcctcggagccacctcttgtcctccccctagatctgaaagattaaagagacagaacttatgtggcaagaagtgttggctgtaattgatttcctacttcttctggttagaatacttttgttcttccgatattacagccccccaggccatgaatttctctgtccatgctgggtttaatatttctgctaaaaccttgttaaattgcctccagaatgggaaactcttcttcccggcctcataaagattggagccctctctaatgtatgttacaaaatttctccctgggcttctcagaggattatggggtccaccttaaaaaaggcaaactcctgacattctgtgaagtagaatggccacagtttggaaccgggtggcccccagaagggtcactgaatctcacagctgttcaggctgtgtggcgggtcgttgctggaactcccagtcaccccgatcagtttccctacattgatcaatggctgagcttggtctggagccctctcgcttggctccgctcatgtgccattcataatcttacctccaaggtccttttgagccaggcctcactgtcatcccaacccttggccccctcggctcctcctgtattgcctccttctgaagaagaggaaagtttttctcacgcatttctgctgccttataaccttcctgctccctcagaatcttccctagtctcctcgactacatctcctttgggctctccacctattgcctcctgattgcggctgcggcaggaggaggtagcccccctcctcctgctgagagaggcacaaatccctccgggtgatgagcgctcagctccattcttggtttatgtccctttctttacttctgacctgtacaactggaaggctcataatccccccttctctgaaaaaccccaggtcttgacctcattgatggagtccgtgctccagacccaccggcccacctgggatgactgttaacggctccttttaactctttcacctctggagagagggaacgtatccgaagagaagctaactgttacagtagctgcagtctctccaacaggtacaagacagcatccagctgcttgtccaaggagcacatcccaatgcagttcctgaccagatggggctctgccactctttccagctgggtgacctggagtatgttaaaaagttccagaaggaaggactcactcctgcctggaaaggacctcatactgtcatcctcaccacgccaacagctctgaaagtagacagcattccggctggattcatcactctcgcatcaagaagaccaacaaagcccagcaagaaacatgggtccccaagcctgggacaagccccttaaaactgcgcctaagttgagtgaagccattagattaattctttatctcttttgtttccacctgtcatgccctctgctccttcctactcttttctccttacttctttcacgacaggactgtgtttgcaaacaccacctggaaggcaggaacctctgaggaagtcttttttgcagtgatttatgtgctctgttcccagagcctgcccatactctcgaagagcaacacaatctgccgatcataggagcagggaacgttgaccttgctgcagggtttggacactccggaagccagacaggatgtgggagctccaaaggtgcagaaaaaggactccagaatgttgacttttacctctgtcctcgaaatcaccctaactctagttgttgagattcttaccagtttttctgccctgactggacatgtgtaactttggccacctactctgggggatcaacccgatcttcaaccctttccatagcttgtgcttcctgtcctaaactgtggactaagagaaattgtaatccccttactataactgttcataatcctaatttagctcaatggaattatggcatgtcttgggattaaggctttatatcccaggatttgatgttggaactatgttcaccatccaaaaaaaaaaaaatcctggtcccatggagccctcctaagccaatcgggcctttaactgatttaggtgaccctgtgttccaaaaatacccagacagtgtcaacttaactgtcccgccgcctttcctggttcctaaacctcagctgcaacaacaacacctccaacccagcctgatgtccattctgggcagggtacatcacctcctcaatctcacccagcctaaactagcctgagattgttggttgtgcctaaaggccaaacccccttattatgttggattaggagtagaagccatgcttaatattgactctctttcttgtcatacatgcccctgtgccctcacactaggagacgtgtccgggaatgcttcttgtctaattagcactggatataatttatctgcttctccctttcaggctacctgttatcagtctttacttacttccttaagcacctcagtctcctaccaggcacctaacaatacctggttagcctgcacttcaggtctcactcgctgcatcaatgggactgaaccaggacctctcttgtgtgtgttggttcatgtgctcccccaggtctacgtatacagtgggacagaaggacaacttctcatcactccccctgaattgcataccaggttttgccgagccgccctactccttgtacccctcctggccggcctaagcacagctgggttggtagccatcagcatggctgccttcattcagggagaaactggactaatgtccctatctcaacaagtagatgctgatttaagccatctccaatcaaccatagatatactccatacccaagtagagtctctagctaaagtagctcttcaaaaccgctgaggcttatatctgctatttgtctctcaaggagggttatgcacagctctgggagagagttgttgcttctgtgccagtcagtctggggtcataaaagatactctccaaaaagttcaagagaatctagatagacaccagcaggagcgggaaaataacacccccctggtaccaaagcatgtttaactggaatccatggctaactactctaatcactgggttagctggacccctcctcctcctcctattgttaggcttagtcttcgagccttgtatattaaattggtttcttaactttgtaaagcaatgcacagcttctgtcaagcttatgtatcttaaagcccaatataacccccttgttaaaactgagtaatcaatgatttgattcccccaaaacacaagtgggaaatgtgatatcctaccttgttttaacctgaaattgattctcccttagctgagagagcgggacagactccattttggctccttcacttgcagccccttacccaccccccttcctcaaggacttaacttgtgcaagctgactcccagcacatcaaagaatgcaattactgataagatactgtggcaagctatatccacagttcccaggaattcacctggttgatagtacccaaagcccccgtgtctgtgtctgttgatggtacctaaagcacctgtgtctatcaccctttgatagatttaaagcccttgcatctggaactatttttctttcctgtaaccatttgtccttttaacttttttgcctgttttacttctgtaaaattgcttcagctaggctccccctcccctttctaaaccaaagtataaaagaaaatctagccccttctttagggctgagagaattttgagcactagccatctctcggtcaccagcaataaaaggactcctgaattagtctcagagtgtggcgtttctctacaactcactcggttacaacagctggtgtttcagctgatataagctggtcttggctagatagtgaacactcaatctgtgggcctgataggacttgacccctcctgtaggttgggctcaaatctgatccacatctattcattcaggggctaacacctaagaaccagcacttctaggggaaaggtcttctcttagtgaccacaggaatgtgggaaggaaagactaactgcatggtcctattgaagcaattaactgcctattgtctgctaacatcccattgtccaaatctagggacagcaatggagtgaggggacttgggggactgcgcctgaactgggagggcagtgagtggagtatggacactgagtgactacatgattaggatcatgtagaagactgtgtggcaatttagcggcacaaagtaaatgttgtggaacattaacttaatctactaccaactgaaaaacttatggggagggagacattaaaaagaaaaatggaaaagacacaaataatgaataaattaaaaggataccaccttaaagatctttcagccattaaaataagagtatattcaggaggctgaggtgggagcattgcttgagcccaggaacttgaggctgcagtgagttatcatcacacctgtgaatagctcctgcactccagcctgggcaatatagtgagagtttatctgttaaaaataaagtaataaaacattttaaataggatactatggaaactttatgtttacttttaaaattaggtgagacttttaaattccaagaaaaacattcaaatactgacatgagaagatagagaaaccctgaatagtccttatgggtgaactgtgaacaggaggcctaggctctctcctatatgcaatcctaggaagatgatgttgcttttattttcctcctgcactgtttccttagaatggacttagatcaatgagaaatgctgcatttcaggcattgtttattgtgaaagctttgcctggggaactgcacctgaactgggaaggcagtgagtggcgtatggacactgaatgatgacatgattgggatcatgtaagagactgtcaggaaagcaaggttttcctaaactaacatggacatggaggtgtcctccaatttgtaagatgttctggatcagacagtgatacctgaacatttcaaggtgaacctcatgcacattaactttaattcccatatagctatgctactgaatggtggtgtgaaatgctagactgctgctgctggacatctctcaccccaccaataacactgaaaatactgatcatgctttttctttgtcctttcataaatctaagttaatttagagtcaagtgaatgcctattgtgttggtgagttttattgcccataagaatttgcaactgttgctggtggccatgcagtcttctaattgtctatgaaaccaaattaaaattttaaaagcttttgcaaagaaaatcccaggcagatgactttttctggaaagttctagcaaatacttaaggaggaaaccactccaatcttatacacattcttccaaagaataaataatgatggtaccttgtctgtatcggtcagtgttcctgcaggaaagaaatggcaaactcacactggacacctgaggagagtttaatgaatggctcttggctctggtgtgagcaaagtcaagggaagtcgataagaaaacccctggccggctgtggtggctcacgtctgtaatcccagcatttttggaggccgaggagggcagatcacctgaggtcaggagttcgagaccatattagtcagatatggtgaaatcctgtcctaaaaatacaaaaattagccgggcatgttggtgggcacctgtagtcccagctactcaggaggctgagacgggagaattgcttgaacccgggaggcggagattgcagtgaatcaagatcatgccactgcactcaagcctgggcgacagaggaagactctgtcaaaaaaaaaaaaatccaagtctagaaaaagcaaaatacccaaagggagacaaagaaaaagagctgttccaaggatgcagtgagacctgcaactgcaggagaggtcaagctcatgggacctttggccatcagtagagggaaacagccactgccaacctgcagccctaagggaagtcagctgggaacaaatcacttcatctcactctcttcttccttcccatatgtcctgccatatctccaatgtgtcaacacccccccaaaaaagggcaacgtagcccaatgatgcaatccagaaaaggccatgttctggtatacggaacaggttgcggaaagggtagactagatttcgcagaataaatggaaatcaccagtatactcctcagttcatttaatgaggctgctataatcctgacagtgaaatccaaccactcagggacatagacaaaattttccacacaagatattggcaaagtcaatgagattatatataaaataatactacatgctgattaaggcagatctataccagaaaagcaagccaggtttcatattaaaaaatcatttgatatactttaaaacattaacagaactaagaaaaaaaaacatatgcacatttcattaaacgtaaataagatgtattataatattcgtcatctttccttgtttaaaaaatgttctcaggccgggtgcggtggctcacacctgtaatcacagcacttttggaggccaaggtgggtggatcactggaggtcaggagttggagatcagcctggccaacatggtgaaatcccgcctctactgaaaatacaaaaattagccaggcgtggtggtgtgtgatggtagtcccagctactccacaggctgagaaaggagactcacttgaacccaggaggcacaggttggagtgagctgagatcgtgccactgcactccagcctaggagacagagagagactctgtctcaaaaaaaaaaaaaaaagaaattaaaaaaataaaatagaaatagaataatatatccttaatctaacaaagcatctaccaaaaattcctaaattaaacttcctatttaatggtgaaatatcaaaagctatccttttgaatccggatgaagcgtatccagaaaagaaggaaagaatagggcaaggaggaagagacaggagaggacagcggggaaaaggagggagtgtgagctgcacccgtgtaacctgcctgccccagctcctccacagccaggctgtcctccccacccaccccgcccctccaccatgggtctctctgctatgggaccactccccgctcagcaggctctcgagctccagcccctctccaggaaatctcatctcccaaaactctgcccagaactctaaagtgaagccagagttgagggagctcctcctccagtgtcaacctggctcccacctcccagtgtgggagaaaagcaaagcgggtgagctgggaggagtgcaggctttggggacaggccattctccaggtgtcagcctggccgcagggccaatggtgcctggcagagaaccacagggctcagtaagcagaggccacgcaagccctaaggtcagatttgagtaggagccagtgtggccaggtgggcaggggccctggttgaggtgaccagaaatcccatcagcaccactgggtctcttagaagatactcaagttcccaaaacaactgggggttagaggcaggggattagtcagacctcaccttggacagcagccccagccctgtctcagccccagggacaccagggcatggggctgtcacaaggaagctggctgaaggccaggtgcctgtgccttgactgagggacacggctcaggtcagtttgctccatgactcctgggaccctacagaccccactccgtgttctcctgcagcccagtgcacagcacgctgctctgctgtgccaggttgtgttgtgttgagttgtgctgtgtcatgtgctgtgtcactgttcctgcagactccctgtccgggagctctagggccctgacctctaagaagccccagccccgagccagcctcaggcaaggtctgcatccctgctgcctccgcttccctggctcagccttgaagctcccgctgacccctctgccactcaccaaccacccatcaccccctacttagaggccaggaagcagcaggggtcgtttcccccttctcttcaccctttctctcttccctccattctccaggacatacaactccaacagaaaccagaaatcctgcaaatgccctgacccacccaccaaccccagggcacctcctgcccaggtatttggcacaggggatgccctcacaccgaccccatcatgtgccctcgtggccccgaggctgtagcatgggatgcctgtctggccctggacctgccctgggccctgccctctgccaccgctcacaggacaaacccaaacaattgctgtcctccctctgaaatggtggtcatgggggtgcagggaaggcctcacgtccctcctgtgcccaggcccctcaccccaacactctggctggctgcatctgctgcccagagcccttggtcaccaggcgtgcagcctggaccacgctgatggcaagggaggcccttcctaagcctagaggtggtctaaaccttcatggaactgctggtcacagtgccagccagagtcccaggtgacgctgagatagctcaaagtggtgcatgggagatgtctgatatcaaccctctcctggaggtagatgatgtctccagcctggtgacttccctggcctccagccaccaccacccccagtgtccccaaggctgaaggtgcaagcttgccctggccctggtcctggcatagaaagtgcacgatctggtcatgtcatgcaggtgaggatacttgtgtgccaggtaacctcaggcaggcatggtggcgcttgtggggcaatcctgtaacctgcagtgtggtgggtgggatgggtgtgtgtgacacaggcaggaactactcctgatggcagctgacgacccacatgtgtactgggtgggtgccaatgggagtagcaggtgagtggctgagcacaggcaggtgaatgagtgacagctacacaaaccccaccactgagcacgtccctcccagggcaaagcagatcagatcacaggcccagccctgggaggcccagaggagcctcaggtcctcaggaaggctcctggccctcttcgccctaggaggaccccccccccgccccaagccggctccacctgtagctgtgggcgtgggagggagacagagcgctctggcggccagagaaggaaggaagatggagggagggcggacttctgctccctgacgctgctgctaggccccctgcggccctcctggagcccacacctttcagctgcagtctcccagccttcgtccccaggacgaagcccactaagccagtgcttttccactgcagctggctgttccgcttggggagggttcccagattgtgcaaagtgaggaagggtcccctgtccctgccccgcagggcccccactccaggcctcccccatctctccctgtctctctcagaggtagaggcagcattaaattaaaatttaattaaaatattaaaaataaagtaaaaaattcaaatatacaacagtagactgtctggcttgcatacaaagaaggccattgcccctttgggtgagccgggcaaggtcagggtctaagaagcgcctctggtgagaagcggttgtcaggctctgatggctgcgggaggagtgactcctcccaggatgagggtctgtgtcctctcagtgctcactcaagttccgtatttccaagtccttccagggggcgtaacgcacgtgagaactgccatttctgtcacagatacgtggccgcatgcatttccaggaaatgtccttggttcgcgaactacagctggcacaatccagcccagggcgttctgtgagctgtagtctccagcaagtgaattccaaaaaaacctcaaagacctcaaagaccatacagggtggacagcgtagtagcagggtttgggaagagaggagctcttttgctagcaaaggcgagagctcgcctggtacaaggtctgcccacgtcccgggagataaacattagtgtgagcgcacgctagacccagaagagtttgccacggccgcacggttttctgggaagtgtagtttcttggtcccggcgccattgtccttaaaagtagagggtggcccttggttccgaggtgtatctttcacctcatcagtatgactatatgccccaggacacttcccgcatggtcctaactgccgggctctgggacgacagccccaggcggtttagttttttaggaaaccgagatctgtttgcccgcggcgccccaggtccgcgcggccgcagagactcctgggaagtgtggtcttccggtacctgcggttcgttgcgcctggaattttgtcccctgcgcggatgattctgggaaatgtcgatcggctgtgggcggcgcactgggtccgccccgctgtagcctcaggcctgacggcgactcccaggctccgggacgattctgggcagtgtcgtccccagaggtcggcggccgttgcccgctcaccagcgacgcggggcgcctgcggggacggtgaggccctgctgaggactccggccagtatgagtcccgggggcggcggcggggctcaggccctgggtctgccccgcggtgtgaccccggccggtgccttggttttcctggccttcatgtcctcctatgtaaacgcggggtgatgacggcgccgacctcttggcgctgttgtgagagtgaagtgggcgcgtggttagacgccagccacagttgtctttgggttatgtcgtcatgaagccggcgctctacagttgtgtaaccttgaacaaatgggttcagtatcttggaatttcagttttgtcatcgtttaaaaaatagatctggaaaaatgtgaacgcacaccgtgcatagtggtgaagactgaacgagctgataaagtttttaccattgttttatgaggattttatttacagagtaattgattttcctcgcaggtggcacctggtaaatggttagcccttgcggagaaacaccctgttagttcccagggagagattggcgccctggagagtgattaccagtgtgcctttccattatggtgtgtcacaggtgccgcaagataagcctgatttttcatgactgctttttcctgcccttctgtgccctcaggacactgcccatctctaagataagagcctggaaagaggactctgttggctgttggaaattgcagagtaatgcctcaggtaggtcggtgtgtccgcaaatcttcctgaaacactttatcaggactgtgtgtttgctttgcttctcctgcctgttcccacctaaccaagtccatttaagggactggatccatggttcctttcagtataggaaggacggagcccacaggagagctccaaggtattatcctcctcacccagtgttcctcttttctacagttttctgctagaagactttctagtcttgccaacattttaaaactgtaattcacaatgcaactttggaatgtaaggttattcggtttatggttgtcaaaactgtaccatgtggtctcaagtgaagagatgcttgcagtcatccttgattcttccctttgacttatacctatattcagatcctctagttggagctaagctatacactgtatacagaatctgaccattagttaccccagcactaccaccaccactaccaccccggtagtgatagcaataaagccacctggattattgcggtagcctcctagctggattccctgcatctgcccttaaccctcatcagtctgttctcagtacagctgtgaccgtggtcctattgttacataaattcctgtcattcctcaacctataatttttcagtggctctaactgagtcacttctgcaatgacctatttgtacaattaggccattacctttctgatcccaccttccttctctgcctcctcattcctgtgagctctagccactgtcactagttgctgtgccatcgacgtggaatattcttcccccacatacgcacaaacttgcatccttatcttcttcgtgtgtttgttccgtggttactttctcagaaaagcttccctgaatggctatttgcaatcgcagtcaccttccctcgcctagcacttccactcctccatcactgctttgttgttttccacagtgtgtgtcactcactagctgatgtactgtatgttcagtatatgcacatgctcattgtctgttcctggtgggaggaatcttttttcttttttgttgtctgttatagcttcagtacccagagggttacctggcaccaaatagatgcttagtaagtaattgtggagtgaataagatgagtaatgacgaactggtggggcagaatcatggcatggaaggtgaagcttgcataggaggggatgtgagtagcagatgtacatgttgggtgaagtctgttttcttggagaagttagataattagaattgaaaaactggtgtggtggtacatgcctgtttttccagctattcgggagggtgatgagttgagaaaatttcttgaaccctgtggtgtgcggctgcagtg
